(19) United States
(12) Patent Application Publication
(10) Pub. No.: US 2023/0203441 A1
(43) Pub. Date: Jun. 29, 2023

(54) CELLS FOR TREATING CANCER

(71) Applicant: LIfT BioSciences Ltd, Brighton (GB)

(72) Inventor: Alex Blyth, Brighton (GB)

(21) Appl. No.: 17/785,012

(22) PCT Filed: Dec. 11, 2020
(86) PCT No.: PCT/GB2020/053199

§ 371 Date: Jun. 13, 2022

(30) Foreign Application Priority Data
Dec. 12, 2019 (GB) 1918313.6

(51) Int. Cl. C12N 5/0787; A61K 35/28; A61K 35/15; A61P 35/00; G01N 33/50; G01N 33/569

(52) U.S. Cl. CPC C12N 5/0642; A61K 35/15; A61K 35/28; A61P 35/00; G01N 33/5011; G01N 33/5047; G01N 33/56972; C12N 2506/11; G01N 2800/52

(57) ABSTRACT

The invention relates to a method for determining the suitability of a granulocyte for treating cancer. The invention also relates to said granulocytes, methods for identifying said granulocytes and stem cells capable of differentiating into said granulocytes, compositions and kits comprising the same, as well as uses of the same for treating cancer.

[0001] The present invention relates to a cell-based therapy suitable for treating cancer.

[0002] Cancer is a leading cause of morbidity and mortality worldwide, with an annual increase in cancer incidence in developed countries. The World Health Organisation stated that in 2012 alone there were approximately 14 million new cancer cases (and 8.2 million associated deaths), with a projected rise to 22 million cases over the next two decades. Current therapeutic strategies include combinations of surgery, radiation, and cytotoxic chemotherapy, however many of these treatments are ultimately ineffective and associated with harmful side-effects.

[0003] Safety and efficacy has been assessed for Haematopoietic Stem Cell Transplantation (HSCT) as a therapeutic technique for treating certain cancers, such as Renal Cell Carcinoma. However, this treatment is still largely seen as experimental due to potentially fatal safety issues, with recipients exhibiting severe Graft vs. Host Disease (GVHD) as a result of the uncontrolled multiplication of pluripotent stem cells. Thus, there is a need for improved and alternative cancer therapies.

[0004] In spite of the increased cancer incidence, it has been observed that approximately 50-60% of individuals do not develop cancer in their lifetime. Indeed, in rare cases, some individuals exhibit spontaneous cancer regression. This observation has led to the study of white blood cells from spontaneous regressor individuals, and use of said white blood cells in Leukocyte Infusion Therapy (LIFT).

[0005] Conventional LIFT is carried out using apheresis for direct transfer of granulocytes (e.g. neutrophils) taken from the donor to the cancer patient. Conventional approaches currently used in the clinic are not practical or scalable for use as a credible cancer therapeutic. First, granulocytes such as neutrophils have a very limited shelf-life (typically less than 24 hours) making them difficult to store. Secondly, apheresis requires approximately 5 (very rare) donors in order to acquire the required cell number. Thirdly, to avoid an allogeneic immune response from repeat exposure, the same donors cannot be used in a subsequent administration, thus requiring an increased pool of appropriate donors. Fourthly, it cannot be realistically expected that donors will be available on request, or willing to provide an endless source of granulocytes for the LIFT procedure. Thus, there is need to quickly and reliably identify suitable donors that produce granulocytes with sufficient cancer killing activity.

[0006] Identifying donors that produce such granulocytes has conventionally been performed using functional assays that measure a percentage of cancer cells killed. However, such assays can be time-consuming. Thus, there is a need for improved/alternative assays that can sensitively and specifically and/or rapidly identify such granulocytes and donors and/or validate any results obtained using functional assays.

[0007] The present invention provides a solution to at least one of the problems described above.

[0008] The present inventors have surprisingly identified a number of genes (and expression levels thereof) that are associated with a granulocyte’s suitability for treating cancer. Advantageously, the expression levels of such genes can be determined using transcriptomic, proteomic or genomic techniques to sensitively and specifically identify and/or rapidly identify granulocytes with therapeutic efficacy and/or donors producing such granulocytes.

[0009] Moreover, by determining the expression of the one or more genes described herein, the present invention allows for the preparation of substantially homogenous populations of granulocytes suitable for treating cancer (e.g. where at least 90% of the granulocytes present are granulocytes suitable for treating cancer).

[0010] In one aspect the present invention provides a method for determining the suitability of a granulocyte for treating cancer, the method comprising:
[0011] a. comparing a measured expression level of one or more genes by the granulocyte, wherein the one or more genes are associated with suitability for treating cancer and are selected from: CTSG, CAP37, ITGB1, CYBB, SYK, DOCK8, COMP, ATG7, SLC2A1, GZMK, ATM, IKBKB, BCAP31, TAPBP, PPP3CB, ANXA1, PERM, PLEC, ACSL1, RAC1, GM2A, and PSMB2, with the expression level of the same one or more genes in a reference standard; and
[0012] b. determining the suitability of the granulocyte for treating cancer based on the comparison.

[0013] Representative sequences for the genes for use in the invention are described in the Sequence Listing herein, together with the appropriate Ensembl Accession numbers. A gene for use in the invention may be one or more shown as SEQ ID NOs: 1-24 or 83-87 or a variant thereof. A gene for use in a method of the invention may comprise (or consist of) a nucleotide sequence having at least 70%, 80%, 90% or 95% sequence identity to any one of SEQ ID NOs: 1-24 or 83-87. Preferably, a gene for use in a method of the invention comprises (more preferably consists of) any one of SEQ ID NOs: 1-24 or 83-87.

[0014] In one aspect the present invention provides a method for determining the suitability of a granulocyte for treating cancer, the method comprising:
[0015] a. measuring an expression level of one or more genes by the granulocyte, wherein the one or more genes are associated with suitability for treating cancer and are selected from: ITGB1, CYBB, SYK, DOCK8, COMP, ATG7, SLC2A1, GZMK, CTSG, ATM, IKBKB, BCAP31, TAPBP, PPP3CB, ANXA1, PERM, PLEC, ACSL1, RAC1, GM2A, CAP37, and PSMB2;
[0016] b. comparing the measured expression level with the expression level of the same one or more genes in a reference standard; and
[0017] c. determining the suitability of the granulocyte for treating cancer based on the comparison.

[0018] In another aspect the invention provides a method for identifying whether or not a donor produces granulocytes suitable for treating cancer, the method comprising:
[0019] a. comparing a measured expression level of one or more genes by a granulocyte comprised in a sample obtainable from the donor, wherein the one or more genes are associated with suitability for treating cancer and are selected from: CTSG, CAP37, ITGB1, CYBB, SYK, DOCK8, COMP, ATG7, SLC2A1, GZMK, ATM, IKBKB, BCAP31, TAPBP, PPP3CB, ANXA1, PERM, PLEC, ACSL1, RAC1, GM2A, and PSMB2, with the expression level of the same one or more genes in a reference standard; and
[0020] b. identifying whether or not the donor produces granulocytes suitable for treating cancer based on the comparison.

[0021] In a related aspect the invention provides a method for identifying whether or not a donor produces granulocytes suitable for treating cancer, the method comprising:
[0022] a. measuring an expression level of one or more genes by a granulocyte comprised in a sample obtainable from the donor, wherein the one or more genes are associated with suitability for treating cancer and are selected from: ITGB1, CYBB, SYK, DOCK8, COMP, ATG7, SLC2A1, GZMK, CTSG, ATM, IKBKB, BCAP31, TAPBP, PPP3CB, ANXA1, PERM, PLEC, ACSL1, RAC1, GM2A, CAP37, and PSMB2;
[0023] b. comparing the measured expression level with the expression level of the same one or more genes in a reference standard; and
[0024] c. identifying whether or not the donor produces granulocytes for treating cancer based on the comparison.

[0025] In a preferred embodiment, the methods referred to herein comprise measuring, and/or comparing a measured expression level of GM2A, PLEC, CYBB, DOCK8, and/or PPP3CB and optionally one or more further genes. Most preferably, the methods referred to herein comprise measuring and/or comparing a measured expression level of GM2A and optionally one or more further genes. Advantageously, the expression of said genes is highly statistically-significantly different between granulocytes that are suitable for treating cancer and granulocytes that are unsuitable for treating cancer. Thus, measuring, and/or comparing a measured expression level of at least one of those genes has particularly high predictive value. Thus, a gene used in any method described herein may be GM2A, PLEC, CYBB, DOCK8, and/or PPP3CB and optionally one or more further genes. Thus, a protein used in any method described herein may be GM2A, PLEC, CYBB, DOCK8, and/or PPP3CB and optionally one or more further proteins. Most preferably, GM2A or GM2A and optionally one or more further genes/proteins.

[0026] In one embodiment, the methods referred to herein are in vitro methods, such as ex vivo methods.

[0027] The term “donor” as used herein refers to a subject (suitably a human subject) from whom a sample is obtainable (e.g. obtained). Any suitable sample from which a stem cell or granulocyte cell is obtainable may be obtainable from the donor. The donor may be selected based on one or more of the following characteristics: sex, age, medical history, and/or blood group type. In one embodiment, a donor may be selected if said donor is a healthy donor. In one embodiment, a donor may be selected if said donor does not have cancer. In one embodiment a donor may be selected if said donor is a male. In another embodiment a donor may be selected if said donor is aged 18-55 and preferably 18-35 (more preferably 18-24). Suitably, a donor may be selected if said donor is a male aged between 18-55 and preferably 18-35 (more preferably 18-24). Without wishing to be bound by theory, it is believed that males in early adulthood have a higher likelihood of producing granulocytes (e.g. neutrophils) that are suitable for treating cancer.

[0028] The term “measuring” as used in reference to expression of one or more genes of the invention encompasses measuring both negative (e.g. no expression) and positive expression (e.g. expression). In one embodiment the expression is positive expression.

[0029] Measuring expression may be carried out by any means known to the person skilled in the art. In some embodiments expression may be measured using high-throughput techniques. For example, measuring expression may be at the level of transcription (e.g. transcriptomic techniques) or translation (e.g. proteomic techniques). Alternatively or additionally, the invention may employ the use of genomics, e.g. to detect the presence or absence of single nucleotide polymorphisms (SNPs), promoter sequences, gene copy number (e.g. duplications), and/or enhancer or other relevant genetic features, preferably those that determine the expression level of one or more genes of the invention. High-throughput techniques can be used to analyse whole genomes, proteomes and transcriptomes rapidly, providing data, including the expression levels, of all of the genes, polypeptides and transcripts in a cell. Proteomics is a technique for analysing the proteome of a cell (e.g. at a particular point in time). The proteome is different in different cell types. Typically, proteomics is carried out by mass-spectrometry, including tandem mass-spectrometry, and gel based techniques, including differential in-gel electrophoresis. Proteomics can be used to detect polypeptides expressed in a particular cell type and generate a proteomic profile to allow for the identification of specific cell types.

[0030] In one embodiment, mRNA of a target gene can be detected and quantified by e.g. Northern blotting or by quantitative reverse transcription PCR (RT-PCR). Single cell gene expression analysis may also be performed using commercially available systems (e.g. Fluidigm Dynamic Array). Alternatively, or in addition, gene expression levels can be determined by analysing polypeptide levels e.g. by using Western blotting techniques such as ELISA-based assays.

[0031] Thus, in one embodiment, gene expression levels are determined by measuring the mRNA/ cDNA levels of the genes of the present invention, such as RNA sequencing (RNA-Seq).

[0032] In a preferred embodiment, gene expression levels are determined by measuring the polypeptide levels produced by the genes of the present invention, such as by way of mass spectrometry, e.g. liquid chromatography and mass spectrometry (LC-MS/MS).

[0033] In one embodiment a granulocyte (or stem cell) for treating cancer may be detected using an enzyme-linked immunosorbent assay (ELISA) or a Luminex assay (commercially available from R&D Systems, USA).

[0034] Thus, in one embodiment a method of the invention comprises measuring and/or comparing an expression level of one or more polypeptides by a granulocyte, wherein the one or more polypeptides are selected from: CTSG, CAP37, ITGB1, CYBB, SYK, DOCK8, COMP, ATG7, SLC2A1, GZMK, CTSG, ATM, IKBKB, BCAP31, TAPBP, PPP3CB, ANXA1, PERM, PLEC, ACSL1, RAC1, GM2A, CAP37, and PSMB2.

[0035] Representative sequences for the polypeptides for use in the invention are described in the Sequence Listing herein, together with the appropriate UniProt Accession numbers. A polypeptide for use in the invention may be one or more shown as SEQ ID NOs: 25-82 or a variant thereof, such as a transcript isoform therefore. A polypeptide for use in a method of the invention may comprise (or consist of) a polypeptide sequence having at least 20%, 30%, 40%, 50%, or 60% sequence identity to any one of SEQ ID NOs: 25-82. In one embodiment a polypeptide for use in a method of the invention may comprise (or consist of) a polypeptide sequence having at least 70%, 80%, 90% or 95% sequence identity to any one of SEQ ID NOs: 25-82. Preferably, a polypeptide for use in a method of the invention comprises (more preferably consists of) any one of SEQ ID NOs: 25-82.

[0036] In one embodiment a method of the invention comprises measuring and/or comparing an amount of one or more polypeptides produced by a granulocyte, wherein the one or more polypeptides are selected from: CTSG, CAP37, ITGB1, CYBB, SYK, DOCK8, COMP, ATG7, SLC2A1, GZMK, CTSG, ATM, IKBKB, BCAP31, TAPBP, PPP3CB, ANXA1, PERM, PLEC, ACSL1, RAC1, GM2A, CAP37, and PSMB2.

[0037] In one embodiment a method of the invention comprises measuring and/or comparing an expression level of one or more polypeptides by a stem cell, wherein the one or more polypeptides are selected from: CTSG, CAP37, ITGB1, CYBB, SYK, DOCK8, COMP, ATG7, SLC2A1, GZMK, CTSG, ATM, IKBKB, BCAP31, TAPBP, PPP3CB, ANXA1, PERM, PLEC, ACSL1, RAC1, GM2A, CAP37, and PSMB2.

[0038] In one embodiment a method of the invention comprises measuring and/or comparing an amount of one or more polypeptides produced by a stem cell, wherein the one or more polypeptides are selected from: CTSG, CAP37, ITGB1, CYBB, SYK, DOCK8, COMP, ATG7, SLC2A1, GZMK, CTSG, ATM, IKBKB, BCAP31, TAPBP, PPP3CB, ANXA1, PERM, PLEC, ACSL1, RAC1, GM2A, CAP37, and PSMB2.

[0039] In one embodiment a method of the invention employs a genome wide association study, which is compared to a reference standard (e.g. a reference standard from a reference population, such as a reference standard from: a suitable or unsuitable donor, or a suitable or unsuitable granulocyte, or a subject that is suitable or unsuitable for treatment with a granulocyte or stem cell of the invention, or a subject that is at risk or not at risk of cancer or combinations thereof).

[0040] Methods suitable for establishing a baseline or reference value for comparing expression levels are conventional techniques known to those skilled in the art.

[0041] The term “increased” as used herein in reference to expression of the one or more genes of the invention may refer to an expression level that is statistically-significantly increased when compared to a reference standard. Such a gene may be considered to be upregulated.

[0042] In one embodiment increased expression means greater than 1-fold, 1.25-fold to about 10-fold or more expression relative to a reference standard. In some embodiments, increased expression means greater than at least about 1.1-fold, 1.2-fold, 1.25-fold, 1.5-fold, 1.75-fold, 2-fold, 4-fold, 5-fold, 10-fold, 15-fold, 20-fold, 25-fold, 30-fold, 35-fold, 40-fold, 50-fold, 75-fold, 100-fold, 150-fold, 200-fold, or at least about 300-fold expression when compared to a reference standard.

[0043] The term “decreased” as used herein in reference to expression of the one or more genes of the invention may refer to an expression level that is statistically-significantly decreased when compared to a reference standard. Such a gene may be considered to be downregulated.

[0044] In one embodiment decreased expression means less than -1-fold, -1.25-fold to about -10-fold or more expression relative to a reference standard. In some embodiments, decreased expression means less than at least about -1.1-fold, -1.2-fold, -1.25-fold, -1.5-fold, -1.75-fold, -2-fold, -4-fold, -5-fold, -10-fold, -15-fold, -20-fold, 25-fold, -30-fold, -35-fold, -40-fold, -50-fold, -75-fold, -100-fold, -150-fold, -200-fold, or at least about -300-fold expression when compared to a reference standard.

[0045] The fold change difference can be in absolute terms (e.g. CPM: counts per million) or Log2CPM (a standard measure in the field) of the expression level in a sample. Preferably the fold change is Log2 fold change. In one embodiment a Log2 change is an increase of at least 0.1, 0.2, 0.3, 0.4, 0.5, 0.6, 0.7, 0.8, 0.9, 1.0, 1.1, 1.2, 1.3, 1.4, 1.5, 1.6, 1.7, 1.8, 1.9, 2.0, 2.1, 2.2, 2.3, 2.4, 2.5, 2.6 or 2.7. In one embodiment a Log2 change is a decrease of 0.1 or more, 0.2 or more, 0.3 or more, 0.4 or more, 0.5 or more, 0.6 or more, 0.7 or more, 0.8 or more, 0.9 or more, 1.0 or more, 1.1 or more, 1.2 or more or 1.3 or more. A decrease may be indicated by the presence of a “-” symbol prior to the value.

[0046] In one embodiment said fold-change is measured and/or is determined by RNA sequencing (RNA-Seq), e.g. in toto.

[0047] The term “unchanged” or “the same” as used herein in reference to expression of the one or more genes of the invention may refer to an expression level that is not statistically-significantly different to a reference standard. Preferably, an expression level that is the same as a reference standard.

[0048] The expression level may be an average such as a mean expression level. In one embodiment statistical significance is determined using two-way ANOVA, e.g. where n is at least 3 and data are presented as mean +/- standard error of mean.

[0049] In one embodiment the methods of the invention comprise measuring expression of combinations of the genes described herein.

[0050] The term “one or more” when used in the context of a gene described herein may mean at least 2, 3, 4, 5, 6, 7, 8, 9, 10, 11, 12, 13, 14, 15, 16, 17, 18, 19, 20, 21 or 22 of the genes. Preferably, the term “one of more” means all of the genes. Likewise, the term “one or more” when used in the context of a polypeptide described herein may mean at least 2, 3, 4, 5, 6, 7, 8, 9, 10, 11, 12, 13, 14, 15, 16, 17, 18, 19, 20, 21 or 22 of the polypeptides. Preferably, the term “one of more” means all of the polypeptides.

[0051] The expression of one or more of ITGB1, CYBB, SYK, DOCK8, COMP, ATG7, SLC2A1, GZMK, CTSG, ATM, IKBKB, BCAP31, TAPBP, PPP3CB, ANXA1, PERM, PLEC, ACSL1, RAC1, GM2A, CAP37, and PSMB2 correlates with a granulocyte’s suitability for treating cancer. Said genes are therefore referred to herein as genes associated with suitability for treating cancer. Thus, the term “one or more genes associated with suitability for treating cancer” (and the like) may in be synonymous with (and thus replaced with) the term “one or more of ITGB1, CYBB, SYK, DOCK8, COMP, ATG7, SLC2A1, GZMK, CTSG, ATM, IKBKB, BCAP31, TAPBP, PPP3CB, ANXA1, PERM, PLEC, ACSL1, RAC1, GM2A, CAP37, and PSMB2”. Thus, the term “one or more polypeptides associated with suitability for treating cancer” (and the like) may in be synonymous with (and thus replaced with) the term “one or more of ITGB1, CYBB, SYK, DOCK8, COMP, ATG7, SLC2A1, GZMK, CTSG, ATM, IKBKB, BCAP31, TAPBP, PPP3CB, ANXA1, PERM, PLEC, ACSL1, RAC1, GM2A, CAP37, and PSMB2”.

[0052] Without wishing to be bound by theory, the inventors believe that, based on the data obtained in the Examples and the inventors’ theorised mechanism of action, the one or more genes may have the following functions making them suitable for treating cancer:
[0053] a. killing cancer cells: GM2A, CTSG, CAP37, CYBB, GZMK, ATM, PERM, ACSL1, ATG7, SYK, DOCK8, RAC1, and PSMB2; and/or
[0054] b. locating and/or binding to cancer cells: ANXA1, ITGB1, COMP, SLC2A1 and PLEC; and/or
[0055] c. recruitment of immune mediators: BCAP31, TAPBP, IKBKB, and PPP3CB.

[0056] In a preferred embodiment a method of the invention comprises measuring and/or comparing the expression of ANXA1. Advantageously, the inventors have shown that low levels of ANXA1 expression are associated with high cancer killing activity and therefore suitability for treating cancer. Without wishing to be bound by theory, the inventors believe that ANXA1 modulates chemotaxis and/or motility of granulocytes and, in particular, that low expression of ANXA1 promotes granulocyte motility and thus location/binding to cancer cells.

[0057] In one embodiment expression of one or more of ITGB1, CYBB, SYK, DOCK8, COMP, ATG7, SLC2A1, GZMK, CTSG, ATM, IKBKB, BCAP31, TAPBP, PERM, PLEC, ACSL1, RAC1, GM2A, CAP37, and PSMB2 is increased in a granulocyte that is suitable for treating cancer when compared to a granulocyte that is unsuitable for treating cancer. Alternatively or additionally, in one embodiment expression of ANXA1 and/or PPP3CB is decreased in a granulocyte that is suitable for treating cancer when compared to a granulocyte that is unsuitable for treating cancer.

[0058] In one embodiment a method of the invention may further comprise measuring and/or comparing expression of one or more genes selected from: S100A9 and S100A8. In one embodiment expression of S100A9 and/or S100A8 may be increased in a granulocyte of the invention when compared to a reference standard, when the reference standard is from a granulocyte that is unsuitable for treating cancer.

[0059] In one embodiment a method of the invention comprises measuring and/or comparing expression of CTSG and at least one further gene selected from: CAP37, ITGB1, CYBB, SYK, DOCK8, COMP, ATG7, SLC2A1, GZMK, ATM, IKBKB, BCAP31, TAPBP, PPP3CB, ANXA1, PERM, PLEC, ACSL1, RAC1, GM2A, and PSMB2. Similarly, a granulocyte of the invention may comprise increased expression of CTSG and:
[0060] at least one further gene selected from: CAP37, ITGB1, CYBB, SYK, DOCK8, COMP, ATG7, SLC2A1, GZMK, ATM, IKBKB, BCAP31, TAPBP, PERM, PLEC, ACSL1, RAC1, GM2A, and PSMB2 when compared to a reference standard, wherein the reference standard is from a granulocyte unsuitable for treating cancer; or
[0061] decreased expression of ANXA1 and/or PPP3CB when compared to a reference standard, wherein the reference standard is from a granulocyte unsuitable for treating cancer.

[0062] In a particularly preferred embodiment, a method of the invention comprises measuring and/or comparing expression of GM2A and at least one further gene selected from: CAP37, ITGB1, CYBB, SYK, DOCK8, COMP, ATG7, SLC2A1, GZMK, ATM, IKBKB, BCAP31, TAPBP, PPP3CB, ANXA1, PERM, PLEC, ACSL1, RAC1, CTSG, and PSMB2. Similarly, a granulocyte of the invention may comprise increased expression of GM2A and:
[0063] at least one further gene selected from: CAP37, ITGB1, CYBB, SYK, DOCK8, COMP, ATG7, SLC2A1, GZMK, ATM, IKBKB, BCAP31, TAPBP, PERM, PLEC, ACSL1, RAC1, CTSG, and PSMB2 when compared to a reference standard, wherein the reference standard is from a granulocyte unsuitable for treating cancer; or
[0064] decreased expression of ANXA1 and/or PPP3CB when compared to a reference standard, wherein the reference standard is from a granulocyte unsuitable for treating cancer.

[0065] In one embodiment a method of the invention comprises measuring and/or comparing expression of CAP37 and at least one further gene selected from: CTSG, ITGB1, CYBB, SYK, DOCK8, COMP, ATG7, SLC2A1, GZMK, ATM, IKBKB, BCAP31, TAPBP, PPP3CB, ANXA1, PERM, PLEC, ACSL1, RAC1, GM2A, and PSMB2. Similarly, a granulocyte of the invention may comprise increased expression of CAP37and:
[0066] at least one further gene selected from: CTSG, ITGB1, CYBB, SYK, DOCK8, COMP, ATG7, SLC2A1, GZMK, ATM, IKBKB, BCAP31, TAPBP, PERM, PLEC, ACSL1, RAC1, GM2A, and PSMB2 when compared to a reference standard, wherein the reference standard is from a granulocyte (or stem cell) unsuitable for treating cancer; or
[0067] decreased expression of ANXA1 and/or PPP3CB when compared to a reference standard, wherein the reference standard is from a granulocyte unsuitable for treating cancer.

[0068] In another embodiment a method of the invention comprises measuring and/or comparing expression of ANXA1 and at least one further gene selected from: CTSG, CAP37, ITGB1, CYBB, SYK, DOCK8, COMP, ATG7, SLC2A1, GZMK, ATM, IKBKB, BCAP31, TAPBP, PPP3CB, PERM, PLEC, ACSL1, RAC1, GM2A, and PSMB2. Similarly, a granulocyte of the invention may comprise decreased expression of ANXA1 and:
[0069] at least one further gene selected from: CTSG, CAP37, ITGB1, CYBB, SYK, DOCK8, COMP, ATG7, SLC2A1, GZMK, ATM, IKBKB, BCAP31, TAPBP, PERM, PLEC, ACSL1, RAC1, GM2A, and PSMB2 when compared to a reference standard, wherein the reference standard is from a granulocyte unsuitable for treating cancer; or
[0070] decreased expression of PPP3CB when compared to a reference standard, wherein the reference standard is from a granulocyte unsuitable for treating cancer.

[0071] The term “for treating cancer” as used herein means “suitable for treating cancer”. A granulocyte that is “suitable for treating cancer” as used herein means that a granulocyte is capable of killing at least 51.5% of cancer cells in the “cancer killing activity (CKA) assay” described herein. In one embodiment a granulocyte is capable of killing at least 70% of cancer cells in the “cancer killing activity (CKA) assay” described herein. Preferably a granulocyte is capable of killing at least 80% (e.g. at least 90% or 95%) of cancer cells in the “cancer killing activity (CKA) assay” described herein. Reference to a stem cell “for treating cancer” or that is “suitable for treating cancer” means that said stem cell is capable of differentiating into a granulocyte that is suitable for treating cancer.

[0072] In contrast a granulocyte that is “not suitable for treating cancer” or is “unsuitable for treating cancer” is a granulocyte that is not capable of killing at least 51.5% of cancer cells in the “cancer killing activity (CKA) assay” described herein, i.e. a granulocyte that kills less than 51.5% of cancer cells in the “cancer killing activity (CKA) assay” described herein. In one embodiment a granulocyte that is “not suitable for treating cancer” or is “unsuitable for treating cancer” is a granulocyte that is not capable of killing at least 70% of cancer cells in the “cancer killing activity (CKA) assay” described herein, i.e. a granulocyte that kills less than 70% of cancer cells in the “cancer killing activity (CKA) assay” described herein.

[0073] Likewise, reference to a stem cell that is “not suitable for treating cancer” or is “unsuitable for treating cancer” is a stem cell that does not differentiate into a granulocyte that is suitable for treating cancer and/or that differentiates into a granulocyte that is unsuitable for treating cancer.

[0074] The “cancer killing activity (CKA) assay” or “CKA assay” is carried out using an ACEA Biosciences xCELLigence RTCA DP Analyzer system® according to the manufacturer’s instructions and as follows:
[0075] a. 6000 cancer cells are placed in the bottom of a 16 well plate;
[0076] b. cells are grown to confluence as determined by plateauing of Cell Index (CI) values (i.e. the ‘normalisation point’);
[0077] c. 60,000 granulocytes are added (i.e. giving a ratio of 10 granulocytes to 1 cancer cells) and incubated at 37° C.; and
[0078] d. the % of cancer cells killed is the maximum % of cancer cells killed by 48 hours after addition of the granulocytes as determined using the following formula: ((Cell Indexₙₒ_{effector} - Cell Index _{effector})/Cell Index ₙₒ_{effector}) X 100.

[0079] The maximum % of cancer cells killed may be referred to herein as “% CKA”.

[0080] Preferably the cancer cells are PANC-1 cells, which are commercially available from the American Type Culture Collection United Kingdom (U.K.), Guernsey, Ireland, Jersey and Liechtenstein, LGC Standards, Queens Road, Teddington, Middlesex, TW11 0LY, UK and have catalogue number ATCC CRL-1469.

[0081] In a particularly preferred embodminent the term “suitable for treating cancer” as used herein further means that a granulocyte kills less than 15% of non-cancer cells in the “non-cancer killing activity (NCKA) assay” described herein. Preferably a granulocyte kills less than 10% (e.g. less than 5% or less than 1%) of non-cancer cells in the “non-cancer killing activity (NCKA) assay” described herein.

[0082] The “non-cancer killing activity (NCKA) assay” or “NCKA assay” is carried out using an ACEA Biosciences xCELLigence RTCA DP Analyzer system® according to the manufacturer’s instructions and as follows:
[0083] a. 6000 non-cancer cells are placed in the bottom of a 16 well plate;
[0084] b. cells are grown to confluence as determined by plateauing of Cell Index (CI) values (i.e. the ‘normalisation point’);
[0085] c. 60,000 granulocytes are added (i.e. giving a ratio of 10 granulocytes to 1 non-cancer cells) and incubated at 37° C.; and
[0086] d. the % of non-cancer cells killed is the maximum % of non-cancer cells killed by 48 hours after addition of the granulocytes as determined using the following formula: ((Cell Index ₙₒ_{effector} - Cell Index _{effector})/Cell Index ₙₒ_{effector}) X 100.

[0087] Preferably the non-cancer cells are MCF-12F non-cancer cells, which are commercially available from the American Type Culture Collection, 10801 University Boulevard. Manassas, VA 20110 USA and have catalogue number ATCC® CRL-10783™. In another embodiment the non-cancer cells are liver cells (e.g. primary non-transplantable liver tissue cells).

[0088] The expression level of one or more genes of the invention may be compared to a reference standard. The comparison may be carried out by any suitable technique known to the person skilled in the art, e.g. a bioinformatics technique. The detected gene expression in the reference standard may have been obtained (e.g. quantified) previously to a method of the invention. The expression level of the genes described herein is suitably known in said reference standard. A reference standard is preferably from the same sample type as that referred to in a method of the invention. For example, both the sample and reference standard may be blood samples.

[0089] In one embodiment the term “sample” as used herein (e.g. in reference to a sample from a donor) may be any sample comprising a granulocyte and/or a stem cell and/or other cell capable of differentiating into a granulocyte, preferably comprising a granulocyte. The sample may be any suitable biofluid sample from which a granulocyte and/or a stem cell and/or other cell capable of differentiating into a granulocyte is obtainable, preferably from which a granulocyte is obtainable. A sample may be a blood sample, such as a peripheral blood sample. The term “blood” as used herein encompasses whole blood, blood serum, and blood plasma. Blood may be subjected to centrifugation in order to separate red blood cells, white blood cells, and plasma. Following centrifugation, the mononuclear cell layer may be removed for use in the present invention.

[0090] The reference standard may be a proteomic profile (indicating an amount of polypeptide expressed by a granulocyte), a transcriptomic profile (indicating an amount of gene expression by a granulocyte, e.g. measured by way of RNA produced by said granulocyte) or a genomic profile. A genomic profile may be used to detect the presence or absence of SNPs, promoter sequences, gene copy number (e.g. duplications), and/or enhancer or other relevant genetic features, preferably those that determine the expression level of one or more genes of the invention. The skilled person will appreciate that both the proteomic and transcriptomic profiles are measures of gene expression and will employ the appropriate reference standard depending on the technique used to measure gene expression in accordance with the invention. For example, where proteomics is used in practising the present invention the skilled person will employ a reference standard that is a proteomic profile, where transcriptomics is used in practising the present invention the skilled person will employ a reference standard that is a transcriptomic profile, and where genomics is used in practising the present invention the skilled person will employ a reference standard that is a genomic profile. A reference standard may refer to a database (e.g. a genomic database), e.g. which may include data from one or more sources, such as one or more subjects and/or cells.

[0091] A reference standard is preferably a reference standard for a granulocyte that is unsuitable for treating cancer (e.g. a transcriptomic or proteomic profile of a granulocyte that is unsuitable for treating cancer). Such a reference standard may be from a subject that does not have cancer (a healthy subject) or from a subject that has cancer. Preferably, such a reference standard is from a subject that does not have cancer. FIG. 1 represents a selection of features that are different between those cells from a subject that has cancer, a normal subject that produces granulocytes unsuitable for treating cancer, and a subject that produces granulocytes that are suitable for treating cancer. Any one of said properties may be measured to characterise granulocytes present in a sample (e.g. in a reference standard).

[0092] In one embodiment expression of one or more of ITGB1, CYBB, SYK, DOCK8, COMP, ATG7, SLC2A1, GZMK, CTSG, ATM, IKBKB, BCAP31, TAPBP, PERM, PLEC, ACSL1, RAC1, GM2A, CAP37, and PSMB2 is increased when compared to a reference standard when the reference standard is from a granulocyte unsuitable for treating cancer. In one embodiment expression of ANXA1 and/or PPP3CB is decreased when compared to a reference standard, when the reference standard is from a granulocyte unsuitable for treating cancer. In one embodiment expression of one or more of ITGB1, CYBB, SYK, DOCK8, COMP, ATG7, SLC2A1, GZMK, CTSG, ATM, IKBKB, BCAP31, TAPBP, PERM, PLEC, ACSL1, RAC1, GM2A, CAP37, and PSMB2 is increased when compared to a reference standard when the reference standard is from a granulocyte unsuitable for treating cancer and expression of ANXA1 and/or PPP3CB is decreased when compared to a reference standard, when the reference standard is from a granulocyte unsuitable for treating cancer.

[0093] A reference standard may be a reference standard for a granulocyte that is suitable for treating cancer (e.g. a transcriptomic or proteomic profile of a granulocyte that is suitable for treating cancer). In one embodiment expression of one or more of ITGB1, CYBB, SYK, DOCK8, COMP, ATG7, SLC2A1, GZMK, CTSG, ATM, IKBKB, BCAP31, TAPBP, PERM, PLEC, ACSL1, RAC1, GM2A, CAP37, and PSMB2 is increased or the same when compared to a reference standard, when the reference standard is from a granulocyte suitable for treating cancer. In one embodiment expression of ANXA1 and/or PPP3CB is decreased or the same when compared to a reference standard, when the reference standard is from a granulocyte suitable for treating cancer.

[0094] In some embodiments the present invention may comprise the use of a reference standard for a granulocyte that is unsuitable for treating cancer and a reference standard for a granulocyte that is suitable for treating cancer.

[0095] A method of the invention may comprise determining the suitability of a granulocyte for treating cancer based on a comparison between a measured expression level of one or more genes of the invention and a reference standard.

[0096] In one embodiment a granulocyte is determined as being suitable for treating cancer when:
[0097] i. a measured expression level of one or more of ITGB1, CYBB, SYK, DOCK8, COMP, ATG7, SLC2A1, GZMK, CTSG, ATM, IKBKB, BCAP31, TAPBP, PERM, PLEC, ACSL1, RAC1, GM2A, CAP37, and PSMB2 is increased when compared to the reference standard when the reference standard is from a granulocyte unsuitable for treating cancer; and/or
[0098] ii. a measured expression level of ANXA1 and/or PPP3CB is decreased when compared to the reference standard, when the reference standard is from a granulocyte unsuitable for treating cancer; and/or
[0099] iii. a measured expression level of one or more of ITGB1, CYBB, SYK, DOCK8, COMP, ATG7, SLC2A1, GZMK, CTSG, ATM, IKBKB, BCAP31, TAPBP, PERM, PLEC, ACSL1, RAC1, GM2A, CAP37, and PSMB2 is increased or the same when compared to the reference standard, when the reference standard is from a granulocyte suitable for treating cancer; and/or
[0100] iv. a measured expression level of ANXA1 and/or PPP3CB is decreased or the same when compared to the reference standard, when the reference standard is from a granulocyte suitable for treating cancer.

[0101] In one embodiment a granulocyte is determined as being unsuitable for treating cancer when:
[0102] i. a measured expression level of one or more of ITGB1, CYBB, SYK, DOCK8, COMP, ATG7, SLC2A1, GZMK, CTSG, ATM, IKBKB, BCAP31, TAPBP, PERM, PLEC, ACSL1, RAC1, GM2A, CAP37, and PSMB2 is decreased or the same when compared to the reference standard, when the reference standard is from a granulocyte unsuitable for treating cancer; and/or
[0103] ii. a measured expression level of ANXA1 and/or PPP3CB is increased or the same when compared to the reference standard, when the reference standard is from a granulocyte unsuitable for treating cancer; and/or
[0104] iii. a measured expression level of one or more of ITGB1, CYBB, SYK, DOCK8, COMP, ATG7, SLC2A1, GZMK, CTSG, ATM, IKBKB, BCAP31, TAPBP, PERM, PLEC, ACSL1, RAC1, GM2A, CAP37, and PSMB2 is decreased when compared to reference standard, when the reference standard is from a granulocyte suitable for treating cancer; and/or
[0105] iv. a measured expression level of ANXA1 and/or PPP3CB is increased when compared to the reference standard, when the reference standard is from a granulocyte suitable for treating cancer.

[0106] The methods of the invention may further comprise selecting (or deselecting/discarding) a granulocyte based on the outcome of the method. In one embodiment, where a granulocyte has been determined to be suitable for treating cancer, a granulocyte may be obtained from a sample from which the tested granulocyte was originally obtained. Alternatively, or additionally a stem cell may be obtained from said sample.

[0107] Accordingly, in one aspect, there is provided an in vitro method for obtaining a granulocyte suitable for treating cancer, said method comprising obtaining a granulocyte from a sample obtainable from a donor wherein said donor produces granulocytes comprising:
[0108] a. increased expression of one or more of ITGB1, CYBB, SYK, DOCK8, COMP, ATG7, SLC2A1, GZMK, CTSG, ATM, IKBKB, BCAP31, TAPBP, PERM, PLEC, ACSL1, RAC1, GM2A, CAP37, and PSMB2 when compared to a reference standard, wherein the reference standard is from a granulocyte unsuitable for treating cancer; and/or
[0109] b. decreased expression of ANXA1 and/or PPP3CB when compared to a reference standard, wherein the reference standard is from a granulocyte unsuitable for treating cancer.

[0110] In a related aspect, there is provided an in vitro method for obtaining a stem cell suitable for treating cancer, said method comprising obtaining a stem cell from a sample obtainable from a donor wherein said donor produces granulocytes comprising:
[0111] a. increased expression of one or more of ITGB1, CYBB, SYK, DOCK8, COMP, ATG7, SLC2A1, GZMK, CTSG, ATM, IKBKB, BCAP31, TAPBP, PERM, PLEC, ACSL1, RAC1, GM2A, CAP37, and PSMB2 when compared to a reference standard, wherein the reference standard is from a granulocyte unsuitable for treating cancer; and/or
[0112] b. decreased expression of ANXA1 and/or PPP3CB when compared to a reference standard, wherein the reference standard is from a granulocyte unsuitable for treating cancer.

[0113] A method of the invention may comprise identifying whether or not a donor produces granulocytes suitable for treating cancer based on a comparison between a measured expression level of one or more genes of the invention and a reference standard.

[0114] In one embodiment a donor is identified as being a donor that produces granulocytes suitable for treating cancer when:
[0115] i. a measured expression level of one or more of ITGB1, CYBB, SYK, DOCK8, COMP, ATG7, SLC2A1, GZMK, CTSG, ATM, IKBKB, BCAP31, TAPBP, PERM, PLEC, ACSL1, RAC1, GM2A, CAP37, and PSMB2 is increased when compared to the reference standard when the reference standard is from a granulocyte unsuitable for treating cancer; and/or
[0116] ii. a measured expression level of ANXA1 and/or PPP3CB is decreased when compared to the reference standard, when the reference standard is from a granulocyte unsuitable for treating cancer; and/or
[0117] iii. a measured expression level of one or more of ITGB1, CYBB, SYK, DOCK8, COMP, ATG7, SLC2A1, GZMK, CTSG, ATM, IKBKB, BCAP31, TAPBP, PERM, PLEC, ACSL1, RAC1, GM2A, CAP37, and PSMB2 is increased or the same when compared to the reference standard, when the reference standard is from a granulocyte suitable for treating cancer; and/or
[0118] iv. a measured expression level of ANXA1 and/or PPP3CB is decreased or the same when compared to the reference standard, when the reference standard is from a granulocyte suitable for treating cancer.

[0119] In one embodiment a donor is not identified as being a donor that produces granulocytes suitable for treating cancer (or is identified as a donor that produces granulocytes that are unsuitable for treating cancer) when:
[0120] i. a measured expression level of one or more of ITGB1, CYBB, SYK, DOCK8, COMP, ATG7, SLC2A1, GZMK, CTSG, ATM, IKBKB, BCAP31, TAPBP, PERM, PLEC, ACSL1, RAC1, GM2A, CAP37, and PSMB2 is decreased or the same when compared to the reference standard, when the reference standard is from a granulocyte unsuitable for treating cancer; and/or
[0121] ii. a measured expression level of ANXA1 and/or PPP3CB is increased or the same when compared to the reference standard, when the reference standard is from a granulocyte unsuitable for treating cancer; and/or
[0122] iii. a measured expression level of one or more of ITGB1, CYBB, SYK, DOCK8, COMP, ATG7, SLC2A1, GZMK, CTSG, ATM, IKBKB, BCAP31, TAPBP, PERM, PLEC, ACSL1, RAC1, GM2A, CAP37, and PSMB2 is decreased when compared to reference standard, when the reference standard is from a granulocyte suitable for treating cancer; and/or
[0123] iv. a measured expression level of ANXA1 and/or PPP3CB is increased when compared to the reference standard, when the reference standard is from a granulocyte suitable for treating cancer.

[0124] The methods of the invention may further comprise selecting (or deselecting) a donor based on the outcome of the method. In one embodiment, where a donor has been identified as being a donor that produces granulocytes suitable for treating cancer, a granulocyte may be obtained from a sample obtainable from said donor.

[0125] In one aspect the invention provides a granulocyte obtainable by a method of the invention.

[0126] Alternatively, or additionally a stem cell may be obtained from a sample obtainable from said donor. Thus, in one aspect the invention provides a method comprising:
[0127] a. identifying a donor that produces granulocytes suitable for treating cancer according to a method of the invention; and
[0128] b. obtaining a stem cell from a sample obtainable from the donor.

[0129] Thus, in one aspect, the invention provides a stem cell obtainable by a method of the invention. The stem cell is capable of differentiating into a granulocyte for treating cancer, wherein the granulocyte comprises:
[0130] a. increased expression of one or more of ITGB1, CYBB, SYK, DOCK8, COMP, ATG7, SLC2A1, GZMK, CTSG, ATM, IKBKB, BCAP31, TAPBP, PERM, PLEC, ACSL1, RAC1, GM2A, CAP37, and PSMB2 when compared to a reference standard, wherein the reference standard is from a granulocyte unsuitable for treating cancer; and/or
[0131] b. decreased expression of ANXA1 and/or PPP3CB when compared to a reference standard, wherein the reference standard is from a granulocyte unsuitable for treating cancer.

[0132] The term “obtainable” as used herein also encompasses the term “obtained”. In one embodiment the term “obtainable” means obtained.

[0133] In a related aspect, there is provided a stem cell which is capable of differentiating into a granulocyte for treating cancer, wherein the granulocyte comprises:
[0134] a. increased expression of one or more of ITGB1, CYBB, SYK, DOCK8, COMP, ATG7, SLC2A1, GZMK, CTSG, ATM, IKBKB, BCAP31, TAPBP, PERM, PLEC, ACSL1, RAC1, GM2A, CAP37, and PSMB2 when compared to a reference standard, wherein the reference standard is from a granulocyte unsuitable for treating cancer; and/or
[0135] b. decreased expression of ANXA1 and/or PPP3CB when compared to a reference standard, wherein the reference standard is from a granulocyte unsuitable for treating cancer.

[0136] The term “stem cell” as used herein encompasses any cell that is capable of differentiating into a granulocyte (preferably a neutrophil). For example, the term “stem cell” may encompass totipotent, pluripotent, multipotent, or unipotent cells. In one embodiment the term “stem cell” encompasses a haematopoietic stem cell, as well as a precursor cell (e.g. differentiated from a haematopoietic stem cell), wherein said precursor cell is capable of differentiating into a granulocyte (preferably a neutrophil). Preferably the term “stem cell” as used herein does not encompass a human embryonic stem cell.

[0137] A stem cell may be part of a stem cell culture.

[0138] The “stem cell” may be a natural stem cell or an artificial stem cell. In one embodiment a natural stem cell may be a cell of the haematopoiesis pathway or a cell equivalent thereto. In one embodiment an artificial stem cell may be an induced pluripotent stem cell (iPSC) or a cell equivalent thereto.

[0139] In one embodiment, an iPSC is obtainable from a somatic cell, such as a somatic cell of a donor. Generation of iPSCs is a well-known technique in the art, see Yu et al (2007), Science, 318:1917-1920 the teaching of which is incorporated herein by reference.

[0140] In another embodiment, an iPSC is obtainable from a stem cell (e.g. obtainable from a donor), such as from a stem cell of the hematopoietic pathway. Preferably an iPSC is obtainable from a hematopoietic stem cell or a precursor cell described herein.

[0141] In one embodiment, a stem cell is a nuclear transfer embryonic stem cell (NT-ESC) or equivalent thereto. In one embodiment, an NT-ESC is obtainable by injecting the nucleus of a cell from the donor into an egg cell from which the original nucleus has been removed. Generation of NT-ESCs is a well-known technique in the art, see Tachibana M, Amato P, Sparman M, et al (2013), Cell, 154(2): 465-466 the teaching of which is incorporated herein by reference.

[0142] In one embodiment where a stem cell is obtained from a sample from a donor, said stem cell may be isolated from said sample. In another embodiment where a stem cell is obtained from a sample from a donor, said sample is a sample comprising stem cells or somatic cells and the stem cell is obtained by inducing pluripotency of and/or reprogramming a cell (e.g. a somatic cell) in said sample to obtain a stem cell (e.g. an iPSC).

[0143] In one embodiment the cell is reprogrammed into an induced pluripotent stem. The cell which is reprogrammed may be a hematopoietic progenitor cell, a mononuclear myeloid cell or a peripheral blood mononuclear cell using methods based on the disclosure in Ohmine et al, Stem Cell Res Ther 2011 Nov;2(6):46 and/or Rim et al, J Vis Exp 2016;(118) which are incorporated herein by reference.

[0144] In another embodiment the cell is reprogrammed into a multipotent stem cell, for example a hematopoietic stem cell, or a progenitor cell, for example a multilineage blood progenitor. The cell which is reprogrammed may be a fibroblast or a blood cell using methods based on the disclosure in Riddell et al, Cell 2014; 157(3) 549-64 and/or Szabo et al, Nature 2010; 468(7323) 521-526.

[0145] In another embodiment where a stem cell is obtained from a sample from a donor, said sample is a sample comprising stem cells or somatic cells and the stem cell is obtained by injecting the nucleus of a cell (e.g. a somatic cell) in said sample into an egg cell (e.g. from which the original nucleus has been removed) to obtain an NT-ESC.

[0146] In a preferred embodiment a stem cell is a haematopoietic stem cell. A haematopoietic stem cell may, in one embodiment, be selected on the basis of cell surface polypeptide markers, for example selected from CD34 (e.g. UniProt accession number P28906), CD59 (e.g. UniProt accession number P13987), Thy1 (e.g. UniProt accession number P04216), CD38 (e.g. UniProt accession number P28907), C-kit (e.g. UniProt accession number P10721), and lin. In one embodiment a haematopoietic stem cell comprises the cell surface polypeptide markers CD34⁺, CD59⁺, Thy1⁺, CD38^{low/-}, C-kit^{low/-}, and lin-. Preferably a haematopoietic cell expresses CD34. Antibodies to detect the presence or absence of said markers are commercially available and may be obtained from BD Biosciences Europe, ebioscience, Beckman Coulter and Pharmingen, for example.

[0147] Most preferably, a stem cell is a precursor cell (which may be referred to herein as a “granulocyte precursor cell”). In one embodiment a precursor cell is a granulocyte-committed progenitor, preferably a neutrophil-committed progenitor. A precursor cell may be one or more selected from a common myeloid progenitor cell, a myeloblast, a promyelocyte (e.g. a N. promyelocyte), a myelocyte (e.g. a N. myelocyte), a metamyelocyte (e.g. a N. metamyelocyte), a band (e.g. an N. band), or combinations thereof. Preferably, a precursor cell is a N. promyelocyte.

[0148] A stem cell of the present invention is preferably an isolated stem cell, e.g. a stem cell that has been isolated from its physiological surroundings, such as an ex vivo stem cell.

[0149] A stem cell may be differentiated into a granulocyte. A stem cell (e.g. a haematopoietic stem cell, an iPSC, or a NT-ESC) may be differentiated into another type of stem cell (e.g. a precursor cell). Differentiation may be carried out using any suitable method, such as a method based on the disclosure in Lengerke et al, Ann N Y Acad Sci, 2009 Sep; 1176:219-217, Pawlowski et al, Stem Cell Reports 2017 Apr 11;8(4):803-812, Doulatov et al, Cell Stem Cell, 2013, Oct 3; 13(4)459-470, Lieber et al, Blood, 2004 Feb 1;103(3):852-9, and/ or Choi et al, Nat. Protoc., 2011 Mar;6(3):296-313, and/or Timmins et. al. Biotechnology and bioengineering. 2009;104(4):832-40, which are incorporated herein by reference.

[0150] In one aspect, the invention provides a method for preparing a stem cell suitable for treating cancer, the method comprising:
[0151] a. identifying a donor that produces granulocytes for treating cancer according to a method of the invention; and
[0152] b. obtaining the stem cell from a sample obtainable from said donor.

[0153] In another aspect, the invention provides a method for producing a stem cell for treating cancer, the method comprising:
[0154] a. providing a stem cell obtainable from a sample from a donor wherein said donor produces granulocytes comprising:
   [0155] i. increased expression of one or more of ITGB1, CYBB, SYK, DOCK8, COMP, ATG7, SLC2A1, GZMK, CTSG, ATM, IKBKB, BCAP31, TAPBP, PERM, PLEC, ACSL1, RAC1, GM2A, CAP37, and PSMB2 when compared to a reference standard, wherein the reference standard is from a granulocyte unsuitable for treating cancer; and/or
   [0156] ii. decreased expression of ANXA1 and/or PPP3CB when compared to a reference standard, wherein the reference standard is from a granulocyte unsuitable for treating cancer; and
[0157] b. differentiating the stem cell into a different stem cell (preferably a precursor cell); and
[0158] c. optionally isolating the different stem cell (preferably the precursor cell).

[0159] In embodiments where the stem cell is a precursor cell, the different stem cell may be a different precursor cell.

[0160] In one embodiment, the sample comprises a somatic cell and obtaining the stem cell from the sample comprises reprograming the somatic cell into a stem cell.

[0161] In one aspect the invention provides a method for producing a granulocyte for treating cancer, the method comprising:
[0162] a. providing a cell; and
[0163] b. converting the cell into a granulocyte having an expression profile described herein, for example wherein:
   [0164] i. the measured expression level of one or more of GM2A, CTSG, CAP37, ITGB1, CYBB, SYK, DOCK8, COMP, ATG7, SLC2A1, GZMK, ATM, IKBKB, BCAP31, TAPBP, PERM, PLEC, ACSL1, RAC1, and PSMB2 is increased in the granulocyte when compared to a reference standard when the reference standard is from a granulocyte unsuitable for treating cancer; or
   [0165] ii. the measured expression level of ANXA1 and/or PPP3CB is decreased in the granulocyte when compared to the reference standard, when the reference standard is from a granulocyte unsuitable for treating cancer; or
   [0166] iii. the measured expression level of one or more of GM2A, CTSG, CAP37, ITGB1, CYBB, SYK, DOCK8, COMP, ATG7, SLC2A1, GZMK, ATM, IKBKB, BCAP31, TAPBP, PERM, PLEC, ACSL1, RAC1, and PSMB2 is increased or the same when compared to the reference standard, when the reference standard is from a granulocyte suitable for treating cancer; or
   [0167] iv. the measured expression level of ANXA1 and/or PPP3CB is decreased or the same when compared to the reference standard, when the reference standard is from a granulocyte suitable for treating cancer; and
[0168] c. optionally isolating the granulocyte.

[0169] In one embodiment a method for producing a granulocyte for treating cancer comprises:
[0170] a. providing a cell; and
[0171] b. converting the cell into a granulocyte having an expression profile described herein, for example wherein:
   [0172] i. the measured expression level of one or more of GM2A, CTSG, CAP37, ITGB1, CYBB, SYK, DOCK8, COMP, ATG7, SLC2A1, GZMK, ATM, IKBKB, BCAP31, TAPBP, PERM, PLEC, ACSL1, RAC1, and PSMB2 is increased in the granulocyte when compared to a reference standard when the reference standard is from a granulocyte unsuitable for treating cancer; and/or (preferably and)
   [0173] ii. the measured expression level of ANXA1 and/or PPP3CB is decreased in the granulocyte when compared to the reference standard, when the reference standard is from a granulocyte unsuitable for treating cancer; and/or (preferably and)
   [0174] iii. the measured expression level of one or more of GM2A, CTSG, CAP37, ITGB1, CYBB, SYK, DOCK8, COMP, ATG7, SLC2A1, GZMK, ATM, IKBKB, BCAP31, TAPBP, PERM, PLEC, ACSL1, RAC1, and PSMB2 is increased or the same when compared to the reference standard, when the reference standard is from a granulocyte suitable for treating cancer; and/or (preferably and)
   [0175] iv. the measured expression level of ANXA1 and/or PPP3CB is decreased or the same when compared to the reference standard, when the reference standard is from a granulocyte suitable for treating cancer; and
[0176] c. optionally isolating the granulocyte.

[0177] The cell may be a stem cell according to the invention or a somatic/differentiated cell optionally from a donor who produces granulocytes suitable for treating cancer as determined by a method of the invention. In one embodiment, converting the cell into a granulocyte comprises transdifferentiating a somatic/differentiated cell into a granulocyte using standard techniques known in the art, for example those based on Szabo et al, Nature 2010; 468(7323) 521-526.

[0178] In one embodiment converting the cell into a granulocyte comprises differentiating a stem cell into a granulocyte based on standard techniques known in the art, for example those referenced herein. For example, in one embodiment a method of differentiating a stem cell comprises admixing said stem cell with a granulocyte-macrophage colony-stimulating factor (GM-CSF), a granulocyte colony-stimulating factor (G-CSF), a growth hormone; serotonin, vitamin C, vitamin D, glutamine (Gln), arachidonic acid, AGE-albumin, an interleukin, TNF-alpha, Flt-3 ligand, thrombopoietin, foetal bovine serum (FBS), retinoic acid, lipopolysaccharide (LPS), IFN-gamma, IFN-beta or combinations thereof. In some embodiments, a method of differentiating a stem cell comprises admixing said stem cell with IFN-gamma and GM-CSF. In preferable embodiments, a method of differentiating a stem cell comprises admixing said stem cell with TNF-alpha.

[0179] In one embodiment the invention provides a method of differentiating a stem cell comprising admixing said stem cell with a granulocyte-macrophage colony-stimulating factor (GM-CSF), and a granulocyte colony-stimulating factor (G-CSF), and a growth hormone, and serotonin, and vitamin C, and vitamin D, and glutamine (Gln), and arachidonic acid, and AGE-albumin, and an interleukin, and TNF-alpha, and Flt-3 ligand, and thrombopoietin, and foetal bovine serum (FBS).

[0180] In one embodiment the invention provides a method of differentiating a stem cell comprising admixing said stem cell with a granulocyte-macrophage colony-stimulating factor (GM-CSF), and a granulocyte colony-stimulating factor (G-CSF), and a growth hormone, and serotonin, and vitamin C, and vitamin D, and glutamine (Gln), and arachidonic acid, and AGE-albumin, and an interleukin, and TNF-alpha, and Flt-3 ligand, and thrombopoietin, and foetal bovine serum (FBS), and retinoic acid, and lipopolysaccharide (LPS), and IFN-gamma, and IFN-beta.

[0181] The term “admix” as used herein means mixing one or more components together in any order, whether sequentially or simultaneously. In one embodiment “admix” means contacting a first component with a second component (e.g. a stem cell and GM-CSF).

[0182] In one embodiment differentiation of a stem cell comprises culturing said stem cell with one or more feeder cell(s). Suitably, a feeder cell may be an OP9 cell. OP9 cells (ATCC® CRL-2749™) are commercially available from the American Type Culture Collection United Kingdom (U.K.), Guernsey, Ireland, Jersey and Liechtenstein, LGC Standards, Queens Road, Teddington, Middlesex, TW11 0LY, UK. In one embodiment a stem cell may be cultured with one or more feeder cell(s) and Flt-3 ligand, thrombopoietin, fetal bovine serum (FBS), or combinations thereof.

[0183] Thus in one embodiment, a pharmaceutical composition or cell culture of the invention may further comprise a feeder cell, such as an OP9 cell.

[0184] A stem cell may be immortalised. The person skilled in the art is familiar with immortalisation techniques, which include inter alia introduction of a viral gene that deregulates the cell cycle (e.g. the adenovirus type 5 E1 gene), and artificial expression of telomerase. Immortalisation advantageously allows for the preparation of a cell line which can be stably cultured in vitro. Thus, in one aspect the invention provides an immortalised cell line obtainable (e.g. obtained) from a selected stem cell, as well as a stable stem cell culture. Suitably an immortalised cell line or stable stem cell culture is obtainable (e.g. obtained) by a method of the present invention.

[0185] The term “stable” as used in reference to a stem cell culture or cell line means that the cell culture or cell line has been modified such that it is more amenable to in vitro cell culture than an unmodified cell (i.e. a cell obtained from a donor and subjected directly to in vitro cell culture). Said “stable” cell culture or cell line is therefore capable of undergoing more rounds of replication (preferably for prolonged periods of time) when compared to an unmodified cell.

[0186] In one aspect the invention provides a method for selecting whether or not a subject is suitable for treatment with a granulocyte or a stem cell for treating cancer, the method comprising:
[0187] a. comparing a measured expression level of one or more genes by a granulocyte comprised in a sample obtainable from the subject, wherein the one or more genes are associated with suitability for treating cancer and are selected from: CTSG, CAP37, ITGB1, CYBB, SYK, DOCK8, COMP, ATG7, SLC2A1, GZMK, ATM, IKBKB, BCAP31, TAPBP, PPP3CB, ANXA1, PERM, PLEC, ACSL1, RAC1, GM2A, and PSMB2 with the expression level of the same one or more genes in a reference standard; and
[0188] b. identifying whether or not the subject is suitable for treatment with a granulocyte or a stem cell for treating cancer based on the comparison.

[0189] In one aspect the invention provides a method for selecting whether or not a subject is suitable for treatment with a granulocyte or a stem cell for treating cancer, the method comprising:
[0190] a. measuring an expression level of one or more genes by a granulocyte comprised in a sample obtainable from the subject, wherein the one or more genes are associated with suitability for treating cancer and are selected from: ITGB1, CYBB, SYK, DOCK8, COMP, ATG7, SLC2A1, GZMK, CTSG, ATM, IKBKB, BCAP31, TAPBP, PPP3CB, ANXA1, PERM, PLEC, ACSL1, RAC1, GM2A, CAP37, and PSMB2;
[0191] b. comparing the measured expression level with the expression level of the same one or more genes in a reference standard; and
[0192] c. identifying whether or not the subject is suitable for treatment with a granulocyte or a stem cell for treating cancer based on the comparison.

[0193] The foregoing method allows for the identification of subjects who have granulocytes that are unsuitable for treating cancer and who are appropriate candidates for treatment with a granulocyte or stem cell of the invention. Advantageously, patients who are most likely to respond positively to treatment can be selected, thereby allowing for more cost-effective and/or economical prescribing of the granulocyte and/or stem cell of the invention and/or avoiding selection of an incorrect patient cohort for clinical trials.

[0194] In one embodiment a subject is identified as being suitable for treatment with a granulocyte or stem cell of the invention when:
[0195] i. a measured expression level of one or more of ITGB1, CYBB, SYK, DOCK8, COMP, ATG7, SLC2A1, GZMK, CTSG, ATM, IKBKB, BCAP31, TAPBP, PERM, PLEC, ACSL1, RAC1, GM2A, CAP37, and PSMB2 is decreased or the same when compared to a reference standard, when the reference standard is from a granulocyte unsuitable for treating cancer; or
[0196] ii. a measured expression level of ANXA1 and/or PPP3CB is increased or the same when compared to a reference standard, when the reference standard is from a granulocyte unsuitable for treating cancer; or
[0197] iii. a measured expression level of one or more of ITGB1, CYBB, SYK, DOCK8, COMP, ATG7, SLC2A1, GZMK, CTSG, ATM, IKBKB, BCAP31, TAPBP, PERM, PLEC, ACSL1, RAC1, GM2A, CAP37, and PSMB2 is decreased when compared to a reference standard, when the reference standard is from a granulocyte suitable for treating cancer; or
[0198] iv. a measured expression level of ANXA1 and/or PPP3CB is increased when compared to a reference standard, when the reference standard is from a granulocyte suitable for treating cancer.

[0199] In one embodiment a subject is identified as being unsuitable for treatment with a granulocyte or stem cell of the invention when:
[0200] i. a measured expression level of one or more of ITGB1, CYBB, SYK, DOCK8, COMP, ATG7, SLC2A1, GZMK, CTSG, ATM, IKBKB, BCAP31, TAPBP, PERM, PLEC, ACSL1, RAC1, GM2A, CAP37, and PSMB2 is increased when compared to a reference standard when the reference standard is from a granulocyte unsuitable for treating cancer; or
[0201] ii. a measured expression level of ANXA1 and/or PPP3CB is decreased when compared to a reference standard, when the reference standard is from a granulocyte unsuitable for treating cancer; or
[0202] iii. a measured expression level of one or more of ITGB1, CYBB, SYK, DOCK8, COMP, ATG7, SLC2A1, GZMK, CTSG, ATM, IKBKB, BCAP31, TAPBP, PERM, PLEC, ACSL1, RAC1, GM2A, CAP37, and PSMB2 is increased or the same when compared to a reference standard, when the reference standard is from a granulocyte suitable for treating cancer; or
[0203] iv. a measured expression level of ANXA1 and/or PPP3CB is decreased or the same when compared to a reference standard, when the reference standard is from a granulocyte suitable for treating cancer

[0204] The terms “subject” and “patient” are used synonymously herein. The “subject” may be a mammal, and preferably the subject is a human subject.

[0205] In another aspect the invention provides a method for determining a subject’s risk for developing cancer, the method comprising:
[0206] a. comparing a measured expression level of one or more genes by a granulocyte comprised in a sample obtainable from the subject, wherein the one or more genes are associated with suitability for treating cancer and are selected from: CTSG, CAP37, ITGB1, CYBB, SYK, DOCK8, COMP, ATG7, SLC2A1, GZMK, ATM, IKBKB, BCAP31, TAPBP, PPP3CB, ANXA1, PERM, PLEC, ACSL1, RAC1, GM2A, and PSMB2 with the expression level of the same one or more genes in a reference standard; and
[0207] b. determining the subject’s risk for developing cancer based on the comparison.

[0208] In a related aspect there is provided a method for determining a subject’s risk for developing cancer, the method comprising:
[0209] a. measuring an expression level of one or more genes by a granulocyte comprised in a sample obtainable from the subject, wherein the one or more genes are associated with suitability for treating cancer and are selected from: ITGB1, CYBB, SYK, DOCK8, COMP, ATG7, SLC2A1, GZMK, CTSG, ATM, IKBKB, BCAP31, TAPBP, PPP3CB, ANXA1, PERM, PLEC, ACSL1, RAC1, GM2A, CAP37, and PSMB2;
[0210] b. comparing the measured expression level with the expression level of the same one or more genes in a reference standard; and
[0211] c. determining the subject’s risk for developing cancer based on the comparison.

[0212] In one embodiment a subject is determined as being at risk of developing cancer when:
[0213] i. a measured expression level of one or more of ITGB1, CYBB, SYK, DOCK8, COMP, ATG7, SLC2A1, GZMK, CTSG, ATM, IKBKB, BCAP31, TAPBP, PERM, PLEC, ACSL1, RAC1, GM2A, CAP37, and PSMB2 is decreased or the same when compared to a reference standard, when the reference standard is from a granulocyte unsuitable for treating cancer; or
[0214] ii. a measured expression level of ANXA1 and/or PPP3CB is increased or the same when compared to a reference standard, when the reference standard is from a granulocyte unsuitable for treating cancer; or
[0215] iii. a measured expression level of one or more of ITGB1, CYBB, SYK, DOCK8, COMP, ATG7, SLC2A1, GZMK, CTSG, ATM, IKBKB, BCAP31, TAPBP, PERM, PLEC, ACSL1, RAC1, GM2A, CAP37, and PSMB2 is decreased when compared to a reference standard, when the reference standard is from a granulocyte suitable for treating cancer
[0216] iv. a measured expression level of ANXA1 and/or PPP3CB is increased when compared to a reference standard, when the reference standard is from a granulocyte suitable for treating cancer.

[0217] In one embodiment a subject is determined as not at risk of developing cancer when:
[0218] i. a measured expression level of one or more of ITGB1, CYBB, SYK, DOCK8, COMP, ATG7, SLC2A1, GZMK, CTSG, ATM, IKBKB, BCAP31, TAPBP, PERM, PLEC, ACSL1, RAC1, GM2A, CAP37, and PSMB2 is increased when compared to a reference standard when the reference standard is from a granulocyte unsuitable for treating cancer; or
[0219] ii. a measured expression level of ANXA1 and/or PPP3CB is decreased when compared to a reference standard, when the reference standard is from a granulocyte unsuitable for treating cancer; or
[0220] iii. a measured expression level of one or more of ITGB1, CYBB, SYK, DOCK8, COMP, ATG7, SLC2A1, GZMK, CTSG, ATM, IKBKB, BCAP31, TAPBP, PERM, PLEC, ACSL1, RAC1, GM2A, CAP37, and PSMB2 is increased or the same when compared to a reference standard, when the reference standard is from a granulocyte suitable for treating cancer; or
[0221] iv. a measured expression level of ANXA 1 and/or PPP3CB is decreased or the same when compared to a reference standard, when the reference standard is from a granulocyte suitable for treating cancer

[0222] The term “granulocyte” encompasses the following cell types: neutrophils, basophils, and eosinophils. Preferably the granulocyte is a neutrophil. A granulocyte may express the cell surface polypeptide markers CD11b (e.g. UniProt accession number P11215) and CD15. A granulocyte may also produce reactive oxygen species (O₂⁻). Preferably the granulocyte CD11b^{high}. Alternatively or additionally, the granulocyte may have a higher density than granulocytes unsuitable for treating cancer, and/or a positive cell surface charge (e.g. a net cell charge).

[0223] A granulocyte of the present invention is preferably an isolated granulocyte, e.g. a granulocyte that has been isolated from its physiological surroundings, such as an ex vivo granulocyte.

[0224] In some embodiments the granulocyte is obtainable from a sample obtainable from a donor. In another embodiment a granulocyte may be an engineered granulocyte. Such a granulocyte may be produced by a method comprising:
[0225] a. providing a granulocyte; and
[0226] b. engineering the granulocyte to:
   [0227] i. increase expression of one or more genes selected from: ITGB1, CYBB, SYK, DOCK8, COMP, ATG7, SLC2A1, GZMK, CTSG, ATM, IKBKB, BCAP31, TAPBP, PERM, PLEC, ACSL1, RAC1, GM2A, CAP37, and PSMB2; and/or
   [0228] ii. decrease expression of ANXA1 and/or PPP3CB;
thereby producing the engineered granulocyte, wherein the engineered granulocyte is suitable for treating cancer. In some embodiments the engineered granulocyte may be used as a reference standard in a method of the invention (i.e. as a reference standard from a granulocyte suitable for treating cancer).

[0229] The granulocyte provided for use in the method is preferably a granulocyte that is unsuitable for treating cancer. Thus, in some embodiments a method of the invention converts a cell that is unsuitable for treating cancer into a granulocyte that is suitable for treating cancer. Said granulocyte may be identified by a method described herein, obtained from a donor identified by a method described herein (e.g. from a subject suitable for treatment with a granulocyte or stem cell of the invention), and/or from a subject identified as being at risk of developing cancer.

[0230] In a related aspect the invention provides a method for producing an engineered stem cell, the method comprising:
[0231] a. providing a stem cell; and
[0232] b. engineering the stem cell to:
   [0233] i. increase expression of one or more genes selected from: ITGB1, CYBB, SYK, DOCK8, COMP, ATG7, SLC2A1, GZMK, CTSG, ATM, IKBKB, BCAP31, TAPBP, PERM, PLEC, ACSL1, RAC1, GM2A, CAP37, and PSMB2; and/or
   [0234] ii. decrease expression of ANXA1 and/or PPP3CB;
thereby producing the engineered stem cell, wherein the engineered stem cell is suitable for treating cancer. In some embodiments the engineered stem cell may be used as a reference standard in a method of the invention (i.e. as a reference standard from a stem cell suitable for treating cancer).

[0235] In a related aspect the invention provides a method for producing an engineered stem cell, the method comprising:
[0236] a. providing a stem cell; and
[0237] b. engineering the stem cell such that it is capable of differentiating into a granulocyte having:
   [0238] i. increased expression of one or more genes selected from: ITGB1, CYBB, SYK, DOCK8, COMP, ATG7, SLC2A1, GZMK, CTSG, ATM, IKBKB, BCAP31, TAPBP, PERM, PLEC, ACSL1, RAC1, GM2A, CAP37, and PSMB2; and/or
   [0239] ii. decreased expression of ANXA1 and/or PPP3CB;
thereby producing the engineered stem cell, wherein the engineered stem cell is suitable for treating cancer. In some embodiments the engineered stem cell may be used as a reference standard in a method of the invention (i.e. as a reference standard from a stem cell suitable for treating cancer).

[0240] The stem cell provided for use in the method is preferably a stem cell that is unsuitable for treating cancer. Thus, in some embodiments a method of the invention converts a stem cell that is unsuitable for treating cancer into a stem cell that is suitable for treating cancer. Said stem cell may be identified by a method described herein, obtained from a donor identified by a method described herein (e.g. from a subject suitable for treatment with a granulocyte or stem cell of the invention), and/or from a subject identified as being at risk of developing cancer.

[0241] Engineering a stem cell or granulocyte may be carried out in vivo, for example in one aspect the invention comprises engineering a stem cell or granulocyte in a subject, preferably engineering a stem cell in a subject. In one embodiment the invention may comprise engineering a stem cell or granulocyte in situ in a subject (e.g. in the bone marrow of a subject). Suitably, said subject may be a subject that produces stem cells or granulocytes that are unsuitable for treating cancer, a subject that is suitable for treatment with a granulocyte or stem cell of the invention, a subject that is at risk of developing cancer, or combinations thereof.

[0242] The engineering may be carried out using any means known to the person skilled in the art. In one embodiment expression may be increased or decreased using genome editing. In one embodiment expression may be increased or decreased using CRISPR (e.g. the DNA-snipping CRISPR-associated endonuclease Cas9 genome-editing system), TALENS, Zinc finger proteins, adenoviruses (AV), retroviruses, vectors (e.g. inducible and/or over-expressible vectors), transgene insertion, cisgene over- or under-expression, silencing, or epigenetic modulation of promoter regions through histone deacetylase (HDAC) inhibitors, or combinations thereof. The expression of genes associated with suitability for treating cancer can be modulated in stem cells (e.g. myeloblasts) using methods of culturing (adapted from Gupta D, Shah HP, Malu K, Berliner N, Gaines P. Differentiation and characterization of myeloid cells. Curr Protoc Immunol. 2014;104:Unit 22F 25.), and in any suitable cells by using CRISPR methods (adapted from N.E. Sanjana, O. Shalem, F. Zhang Improved vectors and genome-wide libraries for CRISPR screening Nat. Methods, 11 (2014), pp. 783-784), TALEN systems (adapted from A.A. Nemudryi, K.R. Valetdinova, S.P. Medvedev, and S.M. Zakian TALEN and CRISPR/Cas genome editing systems: tools of discovery. Acta Naturae. 2014; 6(3); 19-40), and Zinc finger proteins (adapted from M.C. Keightley et al. The Pu.1 target gene Zbtb11 regulates neutrophil development through its integrase-like HHCC zinc finger. Nat Commun. 2017;8;14911) to generate cells with key genes knocked-in or knocked-out. Where the cell is a stem cell, said cell can be differentiated to produce granulocytes. Briefly, by using lentiviral transduction of single guide CRISPR-Cas9 vectors, pre-validated CRISPR (guide) gRNA sequences to genes associated with suitability for treating cancer in the lentiviral vector lentiCRISPRv2 can be ordered from GenScript or AddGene. CRISPR knockout experiments may use targeting sequences within exons, whereas CRISPR activation or repression experiments may use targets within promoters. ANXA1 for instance, can be knocked-out of a cell to improve cancer killing activity using a pre-validated gRNA targeting its exon. Lentiviral vectors may be prepared and suitable cells transduced (according to previously published protocols (Satchwell TJ, Hawley BR, Bell AJ, Ribeiro ML, Toye AM. The cytoskeletal binding domain of band 3 is required for multiprotein complex formation and retention during erythropoiesis. Haematologica 2015;100(1):133-142.). Verification of CRISPR on- and off-target effects can be confirmed via whole genome sequencing by comparing the genomic differences between the unedited control and the modified samples. Modified myeloblasts may then be differentiated and identified using the methods of Gupta and colleagues (2014). In one embodiment said approaches may be applied to granulocytes or stem cells.

[0243] In some embodiments the engineering may be modulation of one or more cytokines driving lineage in stem cells and/or genes associated with suitability for treating cancer.

[0244] In one aspect of the invention, there is provided a granulocyte (or engineered granulocyte) for treating cancer, wherein the granulocyte comprises:
[0245] a. increased expression of one or more of ITGB1, CYBB, SYK, DOCK8, COMP, ATG7, SLC2A1, GZMK, CTSG, ATM, IKBKB, BCAP31, TAPBP, PERM, PLEC, ACSL1, RAC1, GM2A, CAP37, and PSMB2 when compared to a reference standard, wherein the reference standard is from a granulocyte unsuitable for treating cancer; and/or
[0246] b. decreased expression of ANXA1 and/or PPP3CB when compared to a reference standard, wherein the reference standard is from a granulocyte unsuitable for treating cancer.

[0247] In one embodiment a granulocyte comprises:
[0248] a. increased expression of one or more of ITGB1, CYBB, SYK, DOCK8, COMP, ATG7, SLC2A1, GZMK, CTSG, ATM, IKBKB, BCAP31, TAPBP, PERM, PLEC, ACSL1, RAC1, GM2A, CAP37, and PSMB2 when compared to a reference standard, wherein the reference standard is from a granulocyte unsuitable for treating cancer; and
[0249] b. decreased expression of ANXA1 and/or PPP3CB when compared to a reference standard, wherein the reference standard is from a granulocyte unsuitable for treating cancer.

[0250] In a particularly preferred embodiment a granulocyte of the invention has a positively charged cell surface (or a more positively charged cell surface when compared to a granulocyte that is unsuitable for treating cancer).

[0251] The skilled person would appreciate that the granulocytes or stem cells of the invention do not need to be activated ex vivo to be suitable for treating cancer. To the extent that the granulocytes or stem cells of the invention are activated ex vivo, the skilled person would appreciate that any activation would further increase the cancer killing activity of the granulocytes or stem cells. Accordingly, in some embodiments, the granulocyte or stem cell for treating cancer has not been activated ex vivo. In some embodiments, the granulocyte or stem cell for treating cancer has not been activated ex vivo with a chemokine or cytokine. For example, in some embodiments, the granulocyte or stem cell for treating cancer has not been activated ex vivo with TGFβ, CCL2, CCL3, CCL5, CXC1, CXC12 and/or CXC16. In preferred embodiments, the granulocyte or stem cell for treating cancer has not been activated ex vivo with CCL2. In preferred embodiments, the granulocyte or stem cell for treating cancer has not been activated ex vivo with TGFβ. In some embodiments, the granulocyte or stem cell for treating cancer has not been activated with a granulocyte-macrophage colony-stimulating factor (GM-CSF), a granulocyte colony-stimulating factor (G-CSF), a growth hormone; serotonin, vitamin C, vitamin D, glutamine (Gln), arachidonic acid, AGE-albumin, an interleukin, TNF-alpha, Flt-3 ligand, thrombopoietin, foetal bovine serum (FBS), retinoic acid, lipopolysaccharide (LPS), IFN-gamma, IFN-beta or combinations thereof. Thus, in some embodiments, the granulocyte or stem cell for treating cancer is an unactivated granulocyte or stem cell.

[0252] Accordingly, in some embodiments of a method of the invention, the method does not comprise activating a granulocyte or stem cell for treating cancer ex vivo. For example, in some embodiments, the method does not comprise activating the granulocyte or stem cell for treating cancer. In some embodiments, the method does not comprise activating the granulocyte or stem cell for treating cancer ex vivo with a chemokine or cytokine. For example, in some embodiments, the method does not comprise activating the granulocyte or stem cell for treating cancer ex vivo with TGFβ, CCL2, CCL3, CCL5, CXC1, CXC12 and/or CXC16. In preferred embodiments, the method does not comprise activating the granulocyte or stem cell for treating cancer ex vivo with CCL2. In preferred embodiments, the method does not comprise activating the granulocyte or stem cell for treating cancer ex vivo with TGFβ. In some embodiments, the method does not comprise activating the granulocyte or stem cell for treating cancer ex vivo with a granulocyte-macrophage colony-stimulating factor (GM-CSF), a granulocyte colony-stimulating factor (G-CSF), a growth hormone; serotonin, vitamin C, vitamin D, glutamine (Gln), arachidonic acid, AGE-albumin, an interleukin, TNF-alpha, Flt-3 ligand, thrombopoietin, foetal bovine serum (FBS), retinoic acid, lipopolysaccharide (LPS), IFN-gamma, IFN-beta or combinations thereof.

[0253] In alternative embodiments, the granulocyte or stem cell for treating cancer has been activated ex vivo. In some embodiments, the granulocyte or stem cell for treating cancer has been activated ex vivo with a chemokine or cytokine. For example, in some embodiments, the granulocyte or stem cell for treating cancer has been activated ex vivo with TGFβ, CCL2, CCL3, CCL5, CXC1, CXC12 and/or CXC16. In preferred embodiments, the granulocyte or stem cell for treating cancer has been activated ex vivo with CCL2. In preferred embodiments, the granulocyte or stem cell for treating cancer has been activated ex vivo with TGFβ. In some embodiments, the granulocyte or stem cell has been activated with a granulocyte-macrophage colony-stimulating factor (GM-CSF), a granulocyte colony-stimulating factor (G-CSF), a growth hormone; serotonin, vitamin C, vitamin D, glutamine (Gln), arachidonic acid, AGE-albumin, an interleukin, TNF-alpha, Flt-3 ligand, thrombopoietin, foetal bovine serum (FBS), retinoic acid, lipopolysaccharide (LPS), IFN-gamma, IFN-beta or combinations thereof. In some embodiments, the granulocyte or stem cell for treating cancer has been activated with IFN-gamma and GM-CSF. In preferred embodiments, the granulocyte or stem cell for treating cancer has been activated with TNF-alpha. Thus, in some embodiments, the granulocyte or stem cell for treating cancer is an activated granulocyte or stem cell.

[0254] Accordingly, in some embodiments of a method of the invention, the method comprises activating a granulocyte or stem cell for treating cancer ex vivo. For example, in some embodiments, the method comprises activating the granulocyte or stem cell for treating cancer. In some embodiments, the method does comprises activating the granulocyte or stem cell for treating cancer ex vivo with a chemokine or cytokine. For example, in some embodiments, the method comprises activating the granulocyte or stem cell for treating cancer ex vivo with TGFβ, CCL2, CCL3, CCL5, CXC1, CXC12 and/or CXC16. In some embodiments, the method comprises activating the granulocyte or stem cell for treating cancer ex vivo with CCL2. In some embodiments, the method comprises activating the granulocyte or stem cell for treating cancer ex vivo with TGFβ. In some embodiments, the method comprises activating the granulocyte or stem cell for treating cancer ex vivo with a granulocyte-macrophage colony-stimulating factor (GM-CSF), a granulocyte colony-stimulating factor (G-CSF), a growth hormone; serotonin, vitamin C, vitamin D, glutamine (Gln), arachidonic acid, AGE-albumin, an interleukin, TNF-alpha, Flt-3 ligand, thrombopoietin, foetal bovine serum (FBS), retinoic acid, lipopolysaccharide (LPS), IFN-gamma, IFN-beta or combinations thereof.

[0255] The present invention may further comprise the validation of a granulocyte or stem cell’s suitability for treating cancer by a different means, e.g. by way of cell surface charge and/or by way of a functional assay.

[0256] In one embodiment granulocyte cell surface charge correlates with suitability for treating cancer, with granulocytes (e.g. neutrophils) that are more positively charged (or less negatively charged) being suitable for treating cancer and/or more efficacious in treating cancer. The level of cell surface charge may be determined when compared to a reference standard, preferably wherein the reference standard is from a granulocyte that is unsuitable for treating cancer. In one embodiment a stem cell may be considered as suitable for treating cancer if it is capable of differentiating into a granulocyte having a more positively charged (or less negatively charged) cell surface. A cell surface charge can be determined using any suitable technique known in the art. In one embodiment the cell surface charge is determined using electrophoresis. An electrophoretic mobility assay may be one described in “Cell Electrophoresis” edited by Johann Bauer (ISBN 0-8493-8918-6 published by CRC Press, Inc.) the teaching of which is incorporated herein in its entirety. In another embodiment cell surface charge can be determined using negatively and/or positively charged means. In one embodiment, a granulocyte has a positive cell surface charge when it can be bound by a negatively charged means, and not a positively charged means. In one embodiment, a granulocyte has a negative cell surface charge when it can be bound by a positively charged means, and not a negatively charged means. Such negatively and/or positively charged means may also be used to measure the concentration of a granulocyte cell in a sample. A positively charged means may be a positively charged particle, nanoprobe or nanoparticle, or a cation exchange media. Suitable nanoparticles may be prepared by conjugating superparamagnetic Iron(II,III) oxide (Fe₃O₄) nanoparticles (NPs) with (3-Aminopropyl)triethoxysilane (APTES) to form a thin layer of Silicon dioxide (SiO₂) shell on the NPs’ surface upon reaction with Tetraethyl orthosilicate (TEOS) and ammonium hydroxide (NH₄OH). Fluorescein isothiocyanates (FITCs) may be embedded in the SiO₂ shell, thus exposing the Si-linked hydroxyl groups (SiO₂—OH) and creating the negative surface charge. Branched poly(ethylene imine) (PEI) molecules may be used to not only to cover the SiO₂—OH groups in a non-covalently manner but also to expose the additional amine groups that carry the positive charges. Thus, in one embodiment a negatively charged nanoparticle is prepared by conjugating Fe₃O₄ nanoparticles with APTES to form a thin layer of SiO₂ shell on the nanoparticle surface upon reaction with Tetraethyl orthosilicate (TEOS) and ammonium hydroxide (NH₄OH), and embedding a FITC in the SiO₂ shell, thus exposing the SiO₂—OH groups (creating the negative surface charge). In another embodiment, a positively charged nanoparticle is prepared by contacting a negatively charged nanoparticle (as described herein) with a PEI molecule (e.g. to expose additional amine groups that carry a positive charge). In one embodiment, the negatively charged means (e.g. nanoparticle) may have a negative surface charge of at least -5 mV, -10 mV, -20 mV, -30 mV, or -40 mV. Preferably, the negatively charged means (e.g. nanoparticle) has may have a negative surface charge of at least -35 mV. In one embodiment, the positively charged means (e.g. nanoparticle) may have a positive surface charge of at least +5 mV, +10 mV, +20 mV, +30 mV, or +40 mV. Preferably, the positively charged means (e.g. nanoparticle) has may have a positive surface charge of at least +35 mV. The surface charge of said positively or negatively charged means (e.g. nanoparticle) may refer to the surface zeta potential of the positively or negatively charged means (e.g. nanoparticle). The surface zeta potential may be measured with a Dynamic light scattering particle size analyser (e.g. the Zetasizer Nano-ZS90, Malvern, UK). In one aspect the present invention involves isolating granulocytes comprising a (more) positive cell surface charge by way of said charge. For example, said cells may be isolated using a negatively charged means, such as a negatively charged particle, nanoprobe or nanoparticle, or an anion exchange media. Such techniques may be used to measure the cell surface charge of granulocytes or the concentration of granulocytes having a positive cell surface charge in the foregoing embodiments. The cells may be isolated from negatively charged, neutrally charged, or less positively charged granulocytes. In one embodiment, a positively or negatively charged means (e.g. nanoparticle) may be detectable by fluorescence. In another embodiment, a positively or negatively charged means (e.g. nanoparticle) may be capable of being captured by way of magnetism, thus allowing isolation of a cell that interacts with said means.

[0257] A functional assay for validating the suitability of a granulocyte or stem cell for treating cancer may comprise:
[0258] a. contacting cancer cells with a granulocyte to form a test sample;
[0259] b. incubating the test sample; and
[0260] c. measuring the % of cancer cells killed in the test sample.

[0261] To validate a stem cell’s suitability, said stem cell may be differentiated into a granulocyte which is employed in the above-mentioned assay.

[0262] In one embodiment a granulocyte or stem cell is validated according to the assay when the granulocyte kills at least 70% of the cancer cells in the test sample. Preferably, a granulocyte or stem cell is validated according to the assay when the granulocyte kills at least 80% or 90% of the cancer cells in the test sample.

[0263] The cancer cell for use in an assay may be one or more selected from a pancreatic cancer cell line, a liver cancer cell line, an oesophageal cancer cell line, a stomach cancer cell line, a cervical cancer cell line, an ovarian cancer cell line, a lung cancer cell line, a bladder cancer cell line, a kidney cancer cell line, a brain cancer cell line, a prostate cancer cell line, a myeloma cancer cell line, a non-Hodgkin’s lymphoma (NHL) cell line, a larynx cancer cell line, a uterine cancer cell line, or a breast cancer cell line. Suitable cell lines are available commercially from the American Type Culture Collection United Kingdom (U.K.), Guernsey, Ireland, Jersey and Liechtenstein, LGC Standards, Queens Road, Teddington, Middlesex, TW11 0LY, UK. For example, a pancreatic cell line may be one or more of Capan-2, ATCC HTB-80; Panc 10.05, ATCC CRL-2547; CFPAC-1, ATCC CRL-1918; HPAF-II, ATCC CRL-1997; SW 1990, ATCC CRL-2172; BxPC-3, ATCC CRL-1687; AsPC-1, ATCC CRL-1682; ATCC® TCP-1026™; SW1990, ATCC CRL-2172; SU.86.86, ATCC CRL-1837; BXPC-3, ATCC CRL-1687; Panc 10.05, ATCC CRL-2547; MIA-PaCa-2, ATCC CRL-1420; PANC-1, ATCC CRL-1469; or ATCC® TCP-2060™. Preferably the cancer cell line is pancreatic cancer cell line, such as PANC-1. In one embodiment the cancer cell line is a cervical cancer cell line, such as a HeLa cell.

[0264] The incubation step may be carried out for between 1 hour and 100 hours. Suitably, the incubation step may be carried out for between 5 hours and 75 hours, for example between 10 hours and 20 hours. The incubation step may be carried out for between 6 hours to 6 days. Suitably, the incubation step may be carried out for between 6 hours and 2 days, for example for between 12 hours to 36 hours, such as between 16 to 24 hours. In one embodiment the incubation step is carried out for 24 hours. In another embodiment the incubation step is carried out for 48 hours. The incubation step may be carried out at any temperature suitable for cell growth and viability, for example at a temperature between 35° C. to 42° C., suitably at 37 or 39° C. Preferably the incubation step is carried out at 37 or 39° C. for 24 hours. Preferably the incubation step is carried out for 16-24 hours at 30-40° C. (e.g. 37° C.).

[0265] The % of cancer cells killed can be measured by reference to the total number of starting cancer cells. The number of cancer cells killed can be measured using any suitable means, for example by viability staining (e.g. trypan blue staining), and microscopy, or using other automated means, for example by cell electronic sensing equipment, such as the RT-CES™ system available from ACEA Biosciences, Inc. (11585 Sorrento Valley Rd., Suite 103, San Diego, CA 92121, USA). In some embodiments the % of cancer cells killed may be determined within 24 hours (e.g. of incubating a cancer cell line and a granulocyte). The % of cancer cells killed is preferably the maximum number of cancer cells killed when carrying out a method of the invention.

[0266] The number of cancer cells killed can be also be measured using the ACEA Biosciences xCELLigence RTCA DP Analyzer system®. The xCELLigence System is a real-time cell analyser, allowing for label-free and dynamic monitoring of cellular phenotypic changes continuously by measuring electrical impedance. Such measurements may be carried out as detailed in Example 11. Said System is commercially available from ACEA Biosciences 6779 Mesa Ridge Road #100, San Diego, CA 92121 USA.

[0267] A ratio of at least 1:1, 5:1 or 10:1 of granulocytes to cancer cells may be used. Preferably a 5:1 ratio of granulocytes to cancer cells is used. More preferably a 10:1 ratio of granulocytes to cancer cells is used.

[0268] A granulocyte or stem cell described herein may be part of a cell culture (e.g. an in vitro cell culture). Accordingly, in one aspect, there is provided an in vitro culture of granulocytes of the invention. In a related aspect, there is provided an in vitro culture of stem cells of the invention.

[0269] A granulocyte or stem cell of the invention may be subjected to one or more further processing steps, such as cryogenic freezing. The further processing step may include admixing said granulocyte or stem cell with a preservation medium, for example a cryogenic preservation medium.

[0270] In one aspect the invention provides a composition for treating cancer, the composition comprising granulocytes: wherein at least 90% of the granulocytes comprised in the composition have:
[0271] a. increased expression of one or more of ITGB1, CYBB, SYK, DOCK8, COMP, ATG7, SLC2A1, GZMK, CTSG, ATM, IKBKB, BCAP31, TAPBP, PERM, PLEC, ACSL1, RAC1, GM2A, CAP37, and PSMB2 when compared to a reference standard, wherein the reference standard is from a granulocyte unsuitable for treating cancer; and/or
[0272] b. decreased expression of ANXA1 and/or PPP3CB when compared to a reference standard, wherein the reference standard is from a granulocyte unsuitable for treating cancer.

[0273] In one aspect the invention provides a composition for treating cancer, the composition comprising granulocytes: wherein at least 95% of the granulocytes comprised in the composition have:
[0274] a. increased expression of one or more of ITGB1, CYBB, SYK, DOCK8, COMP, ATG7, SLC2A1, GZMK, CTSG, ATM, IKBKB, BCAP31, TAPBP, PERM, PLEC, ACSL1, RAC1, GM2A, CAP37, and PSMB2 when compared to a reference standard, wherein the reference standard is from a granulocyte unsuitable for treating cancer; and/or
[0275] b. decreased expression of ANXA1 and/or PPP3CB when compared to a reference standard, wherein the reference standard is from a granulocyte unsuitable for treating cancer.

[0276] In one aspect the invention provides a composition for treating cancer, the composition comprising granulocytes: wherein at least 99% of the granulocytes comprised in the composition have:
[0277] a. increased expression of one or more of ITGB1, CYBB, SYK, DOCK8, COMP, ATG7, SLC2A1, GZMK, CTSG, ATM, IKBKB, BCAP31, TAPBP, PERM, PLEC, ACSL1, RAC1, GM2A, CAP37, and PSMB2 when compared to a reference standard, wherein the reference standard is from a granulocyte unsuitable for treating cancer; and/or
[0278] b. decreased expression of ANXA1 and/or PPP3CB when compared to a reference standard, wherein the reference standard is from a granulocyte unsuitable for treating cancer.

[0279] In one aspect the invention provides a composition for treating cancer, the composition comprising granulocytes: wherein at least 100% of the granulocytes comprised in the composition have:
[0280] a. increased expression of one or more of ITGB1, CYBB, SYK, DOCK8, COMP, ATG7, SLC2A1, GZMK, CTSG, ATM, IKBKB, BCAP31, TAPBP, PERM, PLEC, ACSL1, RAC1, GM2A, CAP37, and PSMB2 when compared to a reference standard, wherein the reference standard is from a granulocyte unsuitable for treating cancer; and/or
[0281] b. decreased expression of ANXA1 and/or PPP3CB when compared to a reference standard, wherein the reference standard is from a granulocyte unsuitable for treating cancer.

[0282] In one embodiment at least 90%, 95%, 99% or 100% of the granulocytes comprised in the composition have:
[0283] a. increased expression of one or more of ITGB1, CYBB, SYK, DOCK8, COMP, ATG7, SLC2A1, GZMK, CTSG, ATM, IKBKB, BCAP31, TAPBP, PERM, PLEC, ACSL1, RAC1, GM2A, CAP37, and PSMB2 when compared to a reference standard, wherein the reference standard is from a granulocyte unsuitable for treating cancer; and
[0284] b. decreased expression of ANXA1 and/or PPP3CB when compared to a reference standard, wherein the reference standard is from a granulocyte unsuitable for treating cancer.

[0285] Advantageously, the compositions of the invention contain a substantially homogeneous population of granulocytes that are suitable for treating cancer.

[0286] The invention also provides a method for isolating granulocytes suitable for treating cancer based on the expression of one or more genes of the invention. Such methods may provide a substantially homogeneous population of granulocytes that are suitable for treating cancer. In one embodiment, granulocytes for treating cancer are isolated using the expression of one or more cell-surface expressed polypeptides selected from: ATG7, CYBB, DOCK8, CTSG, S100A9, COMP, S100A8, CTSG, SYK, ITGB1, SLC2A1, GZMK, ANXA1, RAC1, and CAP37, preferably one or more selected from: ATG7, S100A9, COMP, S100A8, CTSG, SYK, ITGB1, SLC2A1, GZMK, ANXA1, RAC1, and CAP37. The isolation may be performed using any suitable technique. In one embodiment a method for isolating granulocytes comprises the use of a binding means that binds to a polypeptide of the invention. Preferably the binding means is an antibody. Antibodies to detect the presence or absence of polypeptides of the invention are commercially available: anti-CYBB antibody (Cat# M03328, BosterBio), anti-DOCK8 antibody (Ab227529, AbCam), anti-ATG7 antibody (Cat# HPA007639, Atlas Antibodies), anti-S100A9 antibody (HPA004193, Atlas Antibodies), anti-ACSL1 antibody (Cat# HPA011964, Atlas Antibodies), anti-ATM antibody (Cat# HPA067142, Atlas Antibodies), anti-COMP antibody (Cat# AF3134, R&D Systems), anti-TAPBP antibody (Cat# HPA007066, Atlas Antibodies), anti-S100A8 antibody (Cat# AF4570, R&D Systems), anti-PLEC antibody (Cat# HPA029906, Atlas Antibodies), anti-BCAP31 antibody (Cat# HPA003906, Atlas Antibodies), anti-CTSG antibody (Cat# C35667, Sab Biotech), anti-SYK antibody (Cat# Ab40781, AbCam), anti-ITGB1 antibody (Cat# P260111, Sino Biological), anti-PSMB2 antibody (Cat# HPA026322, Atlas Antibodies), anti-GM2A antibody (Cat# HPA008063, Atlas Antibodies), anti-SLC2A1 antibody (Cat# HPA031345, Atlas Antibodies), anti-GZMK antibody (Cat# HPA063181, Atlas Antibodies), anti-IKBKB antibody (Cat# HPA001249, Atlas Antibodies), anti-PPP3CB antibody (Cat# HPA008233, Atlas Antibodies), anti-ANXA1 antibody (Cat# HPA011271, Atlas Antibodies), anti-PERM antibody (Cat# HPA021147, Atlas Antibodies), anti-RAC1 antibody (Cat# HPA047820, Atlas Antibodies), and anti-CAP37 antibody (Cat# HPA055851, Atlas Antibodies). The method may comprise the use of flow cytometric techniques, preferably fluorescence activated cell sorting (FACS), e.g. together with appropriate ‘gating’. Flow cytometric techniques may be particularly suitable when the method employs the use of a binding means coupled to a detectable label, such as a fluorophore.

[0287] In one aspect there is provided a method for isolating a granulocyte for treating cancer, the method comprising:
[0288] a) contacting a sample of granulocytes with a binding means, wherein the binding means binds to one or more polypeptides selected from CTSG, CAP37, ITGB1, CYBB, SYK, DOCK8, COMP, ATG7, SLC2A1, GZMK, ATM, IKBKB, BCAP31, TAPBP, PPP3CB, ANXA1, PERM, PLEC, ACSL1, RAC1, GM2A, and PSMB2; and
[0289] b) isolating the granulocyte based on the presence or absence of binding between the binding means and the one or more polypeptides.

[0290] Binding may be determined to be present when the amount of binding is statistically significant (e.g. when compared to a ‘background’ control). Binding may be determined to be absent when the amount of binding is statistically insignificant (e.g. when compared to a ‘background’ control). Preferably, binding is determined to be absent when there is no binding whatsoever.

[0291] In one embodiment the invention comprises detecting the presence of one or more polypeptides selected from CTSG, CAP37, ITGB1, CYBB, SYK, DOCK8, COMP, ATG7, SLC2A1, GZMK, ATM, IKBKB, BCAP31, TAPBP, PERM, PLEC, ACSL1, RAC1, GM2A, and PSMB2. When said one or more polypeptides are detected (i.e. where there is binding between the binding means and the polypeptide) the granulocyte may be isolated. Suitably, said isolated granulocyte may be a granulocyte for treating cancer.

[0292] In another embodiment the invention may comprise detecting the absence of ANXA1 and/or PPP3CB (e.g. not detecting ANXA1 and/or PPP3CB). When said one or more polypeptides are not detected (i.e. where there is an absence of binding between the binding means and the polypeptide) the granulocyte may be isolated. Suitably, said isolated granulocyte may be a granulocyte for treating cancer.

[0293] Preferably, the invention comprises detecting:
[0294] the presence of one or more polypeptides selected from CTSG, CAP37, ITGB1, CYBB, SYK, DOCK8, COMP, ATG7, SLC2A1, GZMK, ATM, IKBKB, BCAP31, TAPBP, PERM, PLEC, ACSL1, RAC1, GM2A, and PSMB2; and
[0295] the invention absence of ANXA1 and/or PPP3CB. In one embodiment, when said polypeptides are detected or not detected (as indicated), the granulocyte is isolated.

[0296] In one embodiment a method of isolating a granulocyte comprises the use of an immobilised binding means (e.g. a binding means conjugated to a bead, such as a magnetic bead, or chromatographic resin) to isolate a granulocyte of the invention. Such methods may be immuno-affinity methods.

[0297] The method may comprise quantifying the amount of binding between the binding means and the one or more polypeptides or between the binding means and the granulocyte. The method may comprise isolating a granulocyte for treating cancer based on the quantified amount of binding.

[0298] In one embodiment a granulocyte for treating cancer is isolated when there is a high level of binding between a binding means and one or more polypeptides selected from CTSG, CAP37, ITGB1, CYBB, SYK, DOCK8, COMP, ATG7, SLC2A1, GZMK, ATM, IKBKB, BCAP31, TAPBP, PERM, PLEC, ACSL1, RAC1, GM2A, and PSMB2.

[0299] In one embodiment a granulocyte for treating cancer is isolated when there is a low level of binding between a binding means and ANXA1 and/or PPP3CB.

[0300] Preferably, a granulocyte for treating cancer is isolated when there is:
[0301] a high level of binding between a binding means and one or more polypeptides selected from CTSG, CAP37, ITGB1, CYBB, SYK, DOCK8, COMP, ATG7, SLC2A1, GZMK, ATM, IKBKB, BCAP31, TAPBP, PERM, PLEC, ACSL1, RAC1, GM2A, and PSMB2; and
[0302] a low level of binding between a binding means and ANXA1 and/or PPP3CB.

[0303] A high/low level of binding is preferably relative to a level of binding between the same binding means and polypeptide under the same conditions for a granulocyte that is unsuitable for treating cancer.

[0304] The term “isolating” may mean providing a population of granulocytes in which at least 50%, 60%, 70%, 80% or 90% (preferably at least 95%, 99% or 100%) are granulocytes suitable for treating cancer. In other words, the term “isolating” may mean removing at least 50%, 60%, 70%, 80% or 90% (preferably at least 95%, 99% or 100%) of granulocytes that are unsuitable for treating cancer from a population of granulocytes.

[0305] Thus, the methods for isolating suitably allow for the separation of a granulocyte for treating cancer from granulocyte that is unsuitable for treating cancer.

[0306] In some embodiments a method described herein comprises discarding granulocytes that are unsuitable for treating cancer.

[0307] In one aspect the invention provides a pharmaceutical composition comprising:
[0308] a. a granulocyte, stem cell, or composition of the invention; and
[0309] b. a pharmaceutically acceptable carrier, excipient, adjuvant, and/or salt

[0310] The term “pharmaceutically acceptable carrier, excipient, adjuvant, and/or salt” as used herein means a carrier that can be administered to a subject (e.g. a patient) intravenously, intra-arterially, intraperitoneally, intra-tumourally, intrathecally or combinations thereof (preferably intravenously) without causing harm to said subject. In one embodiment a pharmaceutically acceptable carrier is an injectable carrier, such as a sterile physiological saline solution. In one embodiment a pharmaceutically acceptable carrier, excipient, adjuvant, and/or salt may be Plasma-Lyte A (e.g. commercially available from Baxter, USA), dextrose, sodium chloride, human serum albumin, dextran (e.g. dextran 40 (LMD)), dextrose, DMS or combinations thereof. Plasma-Lyte A may be present at a concentration of 10-50% v/v (preferably 31.25% v/v). 5% dextrose/0.45% sodium chloride may be present at a concentration of 10-50% v/v (preferably 31.25% v/v). 25% HAS may be present at 10-30% v/v (preferably 20% v/v). 10% Dextran 40 (LMD)/5% dextrose may be present at a concentration of 1-30% v/v (preferably 10% v/v). DMS may be present at 1-15% v/v (preferably 7.5% v/v).

[0311] The pharmaceutical composition may comprise a granulocyte-macrophage colony-stimulating factor (GM-CSF), a granulocyte colony-stimulating factor (G-CSF), a growth hormone; serotonin, vitamin C, vitamin D, glutamine (Gln), arachidonic acid, AGE-albumin, an interleukin, TNF-alpha, Flt-3 ligand, thrombopoietin, serum (e.g. foetal bovine serum [FBS]), retinoic acid, lipopolysaccharide (LPS), IFN-gamma, IFN-beta, or combinations thereof. Suitably, the pharmaceutical composition comprises IFN-gamma and a GM-CSF. Preferably, the pharmaceutical composition comprises TNF-alpha. Particularly preferably, the pharmaceutical composition comprises a granulocyte-macrophage colony-stimulating factor (GM-CSF), and a granulocyte colony-stimulating factor (G-CSF), and a growth hormone, and serotonin, and vitamin C, and vitamin D, and glutamine (Gln), and arachidonic acid, and AGE-albumin, and an interleukin, and TNF-alpha, and Flt-3 ligand, and thrombopoietin, and foetal bovine serum (FBS). Preferably, the pharmaceutical composition comprises a granulocyte-macrophage colony-stimulating factor (GM-CSF), and a granulocyte colony-stimulating factor (G-CSF), and a growth hormone, and serotonin, and vitamin C, and vitamin D, and glutamine (Gln), and arachidonic acid, and AGE-albumin, and an interleukin, and TNF-alpha, and Flt-3 ligand, and thrombopoietin, and foetal bovine serum (FBS), and retinoic acid, and lipopolysaccharide (LPS), and IFN-gamma, and IFN-beta.

[0312] In a related aspect the invention provides a kit comprising a granulocyte, stem cell, composition or pharmaceutical composition of the invention; and instructions for use of the same in medicine (e.g. in treating cancer). Suitably, the instructions may be for the use of the same in treating a cancer described in any one of the foregoing embodiments. In some embodiments the instructions also detail an appropriate dosage regimen (e.g. as described in a foregoing embodiment). In one embodiment the instructions are for use of said kit in treating cancer, preferably pancreatic cancer.

[0313] The invention may further comprise depositing a granulocyte, stem cell, composition or pharmaceutical composition of the invention in a cell bank, and thus in a related aspect provides a granulocyte, stem cell, composition or pharmaceutical composition. The term “cell bank” as used herein refers to a storage facility which maintains a cell under suitable conditions for cell viability. For example, the cell may be stored in a metabolically dormant state (e.g. cryogenically frozen). Suitably, a cell comprised within a cell bank is catalogued for appropriate retrieval (e.g. based on blood group, and/or human leukocyte antigen (HLA) type). In one embodiment a cell may be catalogued based on the type of cancer it (or a cell differentiated therefrom) kills. Where the cell bank is a granulocyte cell bank, said cell bank may be replenished using a stem cell of the invention. In some embodiments a stem cell or granulocyte obtained from a donor may be stored and later administered to said donor (e.g. if said donor is diagnosed with cancer), thus constituting a personalised medicine.

[0314] A granulocyte or stem cell of the invention may be formulated in any suitable manner, based on its downstream application (e.g. storage in a cell bank, or use in therapy).

[0315] Thus, one aspect of the invention provides a cell bank comprising the stem cell, granulocyte, composition, or pharmaceutical composition of the present invention.

[0316] The present invention provides granulocytes, stem cells, pharmaceutical compositions, and kits for use in medicine, particularly in the treatment of cancer.

[0317] Thus in one aspect the invention provides a granulocyte of the invention for use in treating cancer. In another aspect the invention provides a stem cell of the invention for use in treating cancer. In another aspect the invention provides a composition of the invention for use in treating cancer. In another aspect the invention provides a pharmaceutical composition of the invention for use in treating cancer. In another aspect the invention provides a kit of the invention for use in treating cancer. Similarly, the invention provides in one aspect use of a granulocyte, stem cell, composition, pharmaceutical composition, or kit of the invention in the manufacture of a medicament for treating cancer. In a related aspect there is provided a method for treating cancer comprising: administering to a subject in need thereof a granulocyte, stem cell, composition, pharmaceutical composition, or kit of the invention.

[0318] In one embodiment a cancer is a solid tumour cancer. The term “solid tumour cancer” refers to an abnormal, malignant mass of tissue that does not contain cysts or liquid inclusions. Examples of solid tumour cancers include carcinomas, sarcomas, and lymphomas.

[0319] A solid tumour cancer may be a carcinoma. A carcinoma may be selected from one or more of an adenocarcinoma, a basal cell carcinoma, a squamous cell carcinoma, an adenosquamous carcinoma, a renal cell carcinoma, a ductal carcinoma in situ (DCIS), an invasive ductal carcinoma, an anaplastic carcinoma, a large cell carcinoma, a small cell carcinoma or combinations thereof. A carcinoma may also be selected from epithelial neoplasms, squamous cell neoplasms, squamous cell carcinoma, basal cell neoplasms, basal cell carcinoma, transitional cell carcinomas, adenocarcinomas (such as Adenocarcinoma not otherwise specified (NOS), linitis plastica, vipoma, cholangiocarcinoma, hepatocellular carcinoma NOS, adenoid cystic carcinoma, renal cell carcinoma, Grawitz tumour), adnexal and skin appendage neoplasms, mucoepidermoid neoplasms, cystic mucinous and serous neoplasms, ductal lobular and medullary neoplasms, acinar cell neoplasms, or complex epithelial neoplasms.

[0320] Alternatively a solid tumour cancer may be a sarcoma. A sarcoma may be selected from Askin’s tumour, sarcoma botryoides, chondrosarcoma, Ewing’s, malignant hemangioendothelioma, malignant schwannoma, osteosarcoma, or soft tissue sarcomas (including alveolar soft part sarcoma, angiosarcoma, cystosarcoma phyllodes, dermatofibrosarcoma protuberans (DFSP), desmoid tumour, desmoplastic small round cell tumour, epithelioid sarcoma, extraskeletal chondrosarcoma, extraskeletal osteosarcoma, fibrosarcoma, gastrointestinal stromal tumour (GIST), hemangiopericytoma, hemangiosarcoma, Kaposi’s sarcoma, leiomyosarcoma, liposarcoma, lymphangiosarcoma, malignant fibrous histiocytoma, undifferentiated pleomorphic sarcoma, malignant peripheral nerve sheath tumour (MPNST), neurofibrosarcoma, rhabdomyosarcoma, and synovial sarcoma).

[0321] Alternatively a solid tumour may be a lymphoma, such as a B-cell lymphoma, a T-cell lymphoma, a NK-cell lymphoma, or a Hodgkin’s lymphoma.

[0322] In one embodiment a granulocyte, stem cell, composition, pharmaceutical composition or kit of the invention is for use in treating one or more of: pancreatic cancer, liver cancer, oesophageal cancer, stomach cancer, cervical cancer, ovarian cancer, lung cancer, bladder cancer, kidney cancer, brain cancer, prostate cancer, myeloma cancer, non-Hodgkin’s lymphoma (NHL), larynx cancer, uterine cancer, or breast cancer.

[0323] Preferably a granulocyte, stem cell, composition, pharmaceutical composition or kit of the invention is for use in treating pancreatic cancer. The pancreatic cancer may be a pancreatic solid tumour cancer, such as a pancreatic adenocarcinoma (e.g. a pancreatic ductal adenocarcinoma).

[0324] Pancreatic cancer is known to be one of the most difficult cancers to treat. However surprisingly, the present inventors have succeeded in providing granulocytes (and stem cells that differentiate into granulocytes) that have particular efficacy against pancreatic cancer cells.

[0325] In some embodiments a stem cell may be differentiated into a granulocyte prior to administration. In preferred embodiments a stem cell may be differentiated into a different stem cell (preferably a precursor cell) prior to administration. In other embodiments a stem cell may be administered to a subject. A stem cell may be administered by any suitable technique known in the art. In one embodiment a subject may be given a stem cell transplant, such as a bone marrow transplant.

[0326] Prior to administration there may be a matching step between a medicament of the invention (e.g. a granulocyte, stem cell, composition, pharmaceutical composition or kit of the invention) and the subject to be treated. Matching may be based on data derived from the donor from which the stem cell, or granulocyte is derived, and similar data obtained from the subject to be treated. Matching may be achieved on the basis of blood group type, human leukocyte antigen (HLA) type similarity, or combinations thereof.

[0327] A granulocyte, stem cell, composition, pharmaceutical composition or kit of the invention may be administered to a subject in a therapeutically effective amount or a prophylactically effective amount.

[0328] The term “treat” or “treating” as used herein encompasses prophylactic treatment (e.g. to prevent onset of a disease) as well as corrective treatment (treatment of a subject already suffering from a disease). Preferably “treat” or “treating” as used herein means corrective treatment.

[0329] The term “treat” or “treating” as used herein refers to the disorder and/or a symptom thereof.

[0330] A “therapeutically effective amount” is any amount of the granulocyte, stem cell, composition, pharmaceutical composition or kit of the invention, which when administered alone or in combination to a subject for treating cancer (or a symptom thereof) is sufficient to effect such treatment of the disorder, or symptom thereof.

[0331] A “prophylactically effective amount” is any amount of the granulocyte, stem cell, composition, pharmaceutical composition or kit of the invention that, when administered alone or in combination to a subject inhibits or delays the onset or reoccurrence of cancer (or a symptom thereof). In some embodiments, the prophylactically effective amount prevents the onset or reoccurrence of a cancer entirely. “Inhibiting” the onset means either lessening the likelihood of cancer onset (or symptom thereof), or preventing the onset entirely.

[0332] In one embodiment a granulocyte is administered to a subject. Preferably, the granulocyte is a neutrophil.

[0333] In one embodiment a stem cell is administered to a subject. Preferably, the stem cell is a precursor cell, e.g. selected from a common myeloid progenitor cell, a myeloblast, a promyelocyte (e.g. a N. promyelocyte), a myelocyte (e.g. a N. myelocyte), a metamyelocyte (e.g. a N. metamyelocyte), a band (e.g. an N. band), or combinations thereof.

[0334] In some embodiments a stem cell and a granulocyte are administered to a subject. Preferably, a precursor cell and a neutrophil are administered to a subject.

[0335] An appropriate dosage range is one that produces the desired therapeutic effect (e.g. wherein the granulocyte, stem cell, composition, pharmaceutical composition or kit of the invention is dosed in a therapeutically or prophylactically effective amount).

[0336] A typical treatment regimen may include administering from 10⁶, 10⁷, 10⁸ or 10⁹ cells (e.g. granulocyte cells or stem cells) to a subject, or up to 10¹², 10¹³ or 10¹⁴ cells to a subject. In one embodiment a treatment regimen includes administering a dose of at least 1 × 10⁹ cells to a subject. Suitably, a treatment regimen may include administering a dose of at least 2 × 10⁹ cells or at least 5 × 10⁹ cells to a subject. In one embodiment a treatment regimen may include administering a dose of at least 1 × 10¹⁰ cells or at least 5 × 10¹⁰ cells to a subject. At least 1 × 10¹¹ or at least 2 × 10¹¹ cells may be administered to a subject. In some embodiments between 1 × 10⁹ to 3 × 10¹¹ or 1 × 10¹⁰ to 3 × 10¹¹ cells are administered to a subject. Suitably, between 5 × 10¹⁰ to 2.5 × 10¹¹ cells are administered to a subject. In one embodiment when the cell is a stem cell, e.g. a precursor cell as defined herein, a treatment regimen includes administering a dose between 1/100^{th} and 1/700^{th}, preferably a dose between 1/200^{th} and 1/400^{th}, such as 1/300^{th}, of the dose when compared to the dose of granulocytes administered.

[0337] A subject for treatment may be dosed once, twice, three times, four times, five times, or six times per week. Alternatively a subject may be dosed daily (e.g. once or twice daily). In other embodiments a subject may be dosed once weekly or bi-weekly. Preferably the dose is weekly. The skilled person will appreciate that the dose can be tailored based on the needs of the subject, and efficacy of the medicament. For example, where the medicament is highly efficacious, the dose may be lowered.

[0338] In one embodiment a subject for treatment is dosed weekly (e.g. once weekly) with at least 2 × 10⁹ cells or at least 2 × 10¹⁰ cells. Suitably, a subject for treatment may be dosed weekly with at least 1 × 10¹¹ or at least 2 × 10¹¹ cells.

[0339] The treatment term can be varied based on the response of the subject to the treatment, and/or the type and/or severity of the cancer. For example, the subject for treatment may be dosed for at least 1 or 2 weeks. Suitably the subject for treatment may be dosed for at least 3 or 4 weeks. In one embodiment the subject for treatment is dosed for at least 5 or 6 weeks, suitably at least 7 or 8 weeks.

[0340] In one embodiment a subject for treatment is dosed for 4-8 weeks with at least 2 × 10⁹ cells, wherein said cells are administered once weekly. Suitably a subject for treatment is dosed for 8 weeks with at least 2 × 10⁹ cells (preferably at least 2 × 10¹⁰ or 2 × 10¹¹ cells), wherein said cells are administered once weekly.

[0341] Administration may be by any suitable technique or route, including but not limited to intravenous injection, intra-arterial injection, intraperitoneal injection, injection into a tumour resection cavity, intrathecal injection, or combinations thereof. Suitably the medicament may be administered intravenously.

[0342] A white blood cell growth factor may be administered with a medicament of the invention. The administration may be sequential or simultaneous (suitably simultaneous). Suitable white blood cell growth factors may include a granulocyte-macrophage colony-stimulating factor (GM-CSF), a granulocyte colony-stimulating factor (G-CSF), a growth hormone; serotonin, vitamin C, vitamin D, glutamine (Gln), arachidonic acid, AGE-albumin, an interleukin, TNF-alpha, Flt-3 ligand, thrombopoietin, foetal bovine serum (FBS), retinoic acid, lipopolysaccharide (LPS), IFN-gamma, IFN-beta, or combinations thereof. Suitably, the white blood cell growth factors comprises IFN-gamma and GM-CSF. Preferably, the white blood cell growth factors comprises TNF-alpha. Suitably the white blood cell growth factors may comprise a granulocyte-macrophage colony-stimulating factor (GM-CSF), and a granulocyte colony-stimulating factor (G-CSF), and a growth hormone, and serotonin, and vitamin C, and vitamin D, and glutamine (Gln), and arachidonic acid, and AGE-albumin, and an interleukin, and TNF-alpha, and Flt-3 ligand, and thrombopoietin, and foetal bovine serum (FBS). Suitably the white blood cell growth factors may comprise a granulocyte-macrophage colony-stimulating factor (GM-CSF), and a granulocyte colony-stimulating factor (G-CSF), and a growth hormone, and serotonin, and vitamin C, and vitamin D, and glutamine (Gln), and arachidonic acid, and AGE-albumin, and an interleukin, and TNF-alpha, and Flt-3 ligand, and thrombopoietin, and foetal bovine serum (FBS), and retinoic acid, and lipopolysaccharide (LPS), and IFN-gamma, and IFN-beta. Particular examples of the foregoing include but are not limited to LEUKINE® brand sargramostim, NEUPOGEN® brand filgrastim, and NEULAST A® brand 5 PEG-filgrastim.

[0343] In one embodiment a stem cell may be administered (e.g. sequentially or simultaneously, preferably simultaneously) with a granulocyte-colony stimulating factor; and a growth hormone; and a serotonin; and an interleukin. In one embodiment a granulocyte precursor cell (e.g. a granulocyte precursor cell culture) is administered (e.g. sequentially or simultaneously, preferably simultaneously) with a granulocyte-colony stimulating factor; and a growth hormone; and a serotonin; and an interleukin.

[0344] In some embodiments a granulocyte or stem cell of the invention may be used in combination with another therapeutic, e.g. in combination with an existing cancer therapy, such as radiotherapy, chemotherapy, and/or immunotherapy.

[0345] In one aspect the present invention provides a method for determining the suitability of a stem cell for treating cancer, the method comprising:
[0346] a. comparing a measured expression level of one or more genes by the stem cell, wherein the one or more genes are associated with suitability for treating cancer and are selected from: CTSG, CAP37, ITGB1, CYBB, SYK, DOCK8, COMP, ATG7, SLC2A1, GZMK, ATM, IKBKB, BCAP31, TAPBP, PPP3CB, ANXA1, PERM, PLEC, ACSL1, RAC1, GM2A, and PSMB2, with the expression level of the same one or more genes in a reference standard; and
[0347] b. determining the suitability of the stem cell for treating cancer based on the comparison.

[0348] In one aspect the present invention provides a method for determining the suitability of a stem cell for treating cancer, the method comprising:
[0349] a. measuring an expression level of one or more genes by the stem cell, wherein the one or more genes are associated with suitability for treating cancer and are selected from: ITGB1, CYBB, SYK, DOCK8, COMP, ATG7, SLC2A1, GZMK, CTSG, ATM, IKBKB, BCAP31, TAPBP, PPP3CB, ANXA1, PERM, PLEC, ACSL1, RAC1, GM2A, CAP37, and PSMB2;
[0350] b. comparing the measured expression level with the expression level of the same one or more genes in a reference standard; and
[0351] c. determining the suitability of the stem cell for treating cancer based on the comparison.

[0352] In another aspect the invention provides a method for identifying whether or not a donor produces stem cells suitable for treating cancer, the method comprising:
[0353] a. comparing a measured expression level of one or more genes by a stem cell comprised in a sample obtainable from the donor, wherein the one or more genes are associated with suitability for treating cancer and are selected from: CTSG, CAP37, ITGB1, CYBB, SYK, DOCK8, COMP, ATG7, SLC2A1, GZMK, ATM, IKBKB, BCAP31, TAPBP, PPP3CB, ANXA1, PERM, PLEC, ACSL1, RAC1, GM2A, and PSMB2, with the expression level of the same one or more genes in a reference standard; and
[0354] b. identifying whether or not the donor produces stem cells suitable for treating cancer based on the comparison.

[0355] In a related aspect the invention provides a method for identifying whether or not a donor produces stem cells for treating cancer, the method comprising:
[0356] a. measuring an expression level of one or more genes by a stem cell comprised in a sample obtainable from the donor, wherein the one or more genes are associated with suitability for treating cancer and are selected from: ITGB1, CYBB, SYK, DOCK8, COMP, ATG7, SLC2A1, GZMK, CTSG, ATM, IKBKB, BCAP31, TAPBP, PPP3CB, ANXA1, PERM, PLEC, ACSL1, RAC1, GM2A, CAP37, and PSMB2;
[0357] b. comparing the measured expression level with the expression level of the same one or more genes in a reference standard; and
[0358] c. identifying whether or not the donor produces stem cells for treating cancer based on the comparison.

[0359] In one embodiment a stem cell is determined to be suitable for treating cancer or a donor is identified as producing stem cells suitable for treating cancer when:
[0360] i. a measured expression level of one or more of ITGB1, CYBB, SYK, DOCK8, COMP, ATG7, SLC2A1, GZMK, CTSG, ATM, IKBKB, BCAP31, TAPBP, PERM, PLEC, ACSL1, RAC1, GM2A, CAP37, and PSMB2 is increased when compared to the reference standard when the reference standard is from a stem cell unsuitable for treating cancer; or
[0361] ii. a measured expression level of ANXA1 and/or PPP3CB is decreased when compared to the reference standard, when the reference standard is from a stem cell unsuitable for treating cancer; or
[0362] iii. a measured expression level of one or more of ITGB1, CYBB, SYK, DOCK8, COMP, ATG7, SLC2A1, GZMK, CTSG, ATM, IKBKB, BCAP31, TAPBP, PERM, PLEC, ACSL1, RAC1, GM2A, CAP37, and PSMB2 is increased or the same when compared to the reference standard, when the reference standard is from a stem cell suitable for treating cancer; or
[0363] iv. a measured expression level of ANXA1 and/or PPP3CB is decreased or the same when compared to the reference standard, when the reference standard is from a stem cell suitable for treating cancer.

[0364] Alternatively, in one embodiment a stem cell is determined to be unsuitable for treating cancer or a donor is identified as producing stem cells unsuitable for treating cancer when:
[0365] i. a measured expression level of one or more of ITGB1, CYBB, SYK, DOCK8, COMP, ATG7, SLC2A1, GZMK, CTSG, ATM, IKBKB, BCAP31, TAPBP, PERM, PLEC, ACSL1, RAC1, GM2A, CAP37, and PSMB2 is decreased or the same when compared to the reference standard, when the reference standard is from a stem cell unsuitable for treating cancer; or
[0366] ii. a measured expression level of ANXA1 and/or PPP3CB is increased or the same when compared to the reference standard, when the reference standard is from a stem cell unsuitable for treating cancer; or
[0367] iii. a measured expression level of one or more of ITGB1, CYBB, SYK, DOCK8, COMP, ATG7, SLC2A1, GZMK, CTSG, ATM, IKBKB, BCAP31, TAPBP, PERM, PLEC, ACSL1, RAC1, GM2A, CAP37, and PSMB2 is decreased when compared to reference standard, when the reference standard is from a stem cell suitable for treating cancer; or
[0368] iv. a measured expression level of ANXA1 and/or PPP3CB is increased when compared to the reference standard, when the reference standard is from a stem cell suitable for treating cancer.

[0369] In one aspect the invention provides a stem cell, wherein the stem cell comprises:
[0370] a. increased expression of one or more of ITGB1, CYBB, SYK, DOCK8, COMP, ATG7, SLC2A1, GZMK, CTSG, ATM, IKBKB, BCAP31, TAPBP, PERM, PLEC, ACSL1, RAC1, GM2A, CAP37, and PSMB2 when compared to a reference standard, wherein the reference standard is from a stem cell unsuitable for treating cancer; and/or
[0371] b. decreased expression of ANXA1 and/or PPP3CB when compared to a reference standard, wherein the reference standard is from a stem cell unsuitable for treating cancer.

[0372] In one aspect the invention provides a method for selecting whether or not a subject is suitable for treatment with a stem cell or granulocyte for treating cancer, the method comprising:
[0373] a. comparing a measured expression level of one or more genes by a stem cell comprised in a sample obtainable from the subject, wherein the one or more genes are associated with suitability for treating cancer and are selected from: CTSG, CAP37, ITGB1, CYBB, SYK, DOCK8, COMP, ATG7, SLC2A1, GZMK, ATM, IKBKB, BCAP31, TAPBP, PPP3CB, ANXA1, PERM, PLEC, ACSL1, RAC1, GM2A, and PSMB2 with the expression level of the same one or more genes in a reference standard; and
[0374] b. identifying whether or not the subject is suitable for treatment with a stem cell or granulocyte for treating cancer based on the comparison.

[0375] In one aspect the invention provides a method for selecting whether or not a subject is suitable for treatment with a stem cell or granulocyte for treating cancer, the method comprising:
[0376] a. measuring an expression level of one or more genes by a stem cell comprised in a sample obtainable from the subject, wherein the one or more genes are associated with suitability for treating cancer and are selected from: CTSG, CAP37, ITGB1, CYBB, SYK, DOCK8, COMP, ATG7, SLC2A1, GZMK, ATM, IKBKB, BCAP31, TAPBP, PPP3CB, ANXA1, PERM, PLEC, ACSL1, RAC1, GM2A, and PSMB2;
[0377] b. comparing the measured expression level with the expression level of the same one or more genes in a reference standard; and
[0378] c. identifying whether or not the subject is suitable for treatment with a stem cell or granulocyte for treating cancer based on the comparison.

[0379] In another aspect the invention provides a method for determining a subject’s risk for developing cancer, the method comprising:
[0380] a. comparing a measured expression level of one or more genes by a stem cell comprised in a sample obtainable from the subject, wherein the one or more genes are associated with suitability for treating cancer and are selected from: CTSG, CAP37, ITGB1, CYBB, SYK, DOCK8, COMP, ATG7, SLC2A1, GZMK, ATM, IKBKB, BCAP31, TAPBP, PPP3CB, ANXA1, PERM, PLEC, ACSL1, RAC1, GM2A, and PSMB2 with the expression level of the same one or more genes in a reference standard; and
[0381] b. determining the subject’s risk for developing cancer based on the comparison.

[0382] In another aspect the invention provides a method for determining a subject’s risk for developing cancer, the method comprising:
[0383] a. measuring an expression level of one or more genes by a stem cell comprised in a sample obtainable from the subject, wherein the one or more genes are associated with suitability for treating cancer and are selected from: CTSG, CAP37, ITGB1, CYBB, SYK, DOCK8, COMP, ATG7, SLC2A1, GZMK, ATM, IKBKB, BCAP31, TAPBP, PPP3CB, ANXA1, PERM, PLEC, ACSL1, RAC1, GM2A, and PSMB2;
[0384] b. comparing the measured expression level with the expression level of the same one or more genes in a reference standard; and
[0385] c. determining the subject’s risk for developing cancer based on the comparison.

[0386] In one embodiment, step c. of any one of the foregoing aspects comprises: identifying the subject as suitable for treatment with a granulocyte or a stem cell for treating cancer or determining that the subject is at risk of developing cancer when:
[0387] i. the measured expression level of one or more of CTSG, CAP37, ITGB1, CYBB, SYK, DOCK8, COMP, ATG7, SLC2A1, GZMKATM, IKBKB, BCAP31, TAPBP, PERM, PLEC, ACSL1, RAC1, GM2A, and PSMB2 is decreased or the same when compared to the reference standard, when the reference standard is from a stem cell unsuitable for treating cancer; or
[0388] ii. the measured expression level of ANXA1 and/or PPP3CB is increased or the same when compared to the reference standard, when the reference standard is from a stem cell unsuitable for treating cancer; or
[0389] iii. the measured expression level of one or more of CTSG, CAP37, ITGB1, CYBB, SYK, DOCK8, COMP, ATG7, SLC2A1, GZMK, ATM, IKBKB, BCAP31, TAPBP, PERM, PLEC, ACSL1, RAC1, GM2A, and PSMB2 is decreased when compared to the reference standard, when the reference standard is from a stem cell suitable for treating cancer; or
[0390] iv. the measured expression level of ANXA1 and/or PPP3CB is increased when compared to the reference standard, when the reference standard is from a stem cell suitable for treating cancer; or identifying the subject as unsuitable for treatment with a granulocyte or a stem cell for treating cancer when or determining that the subject is not at risk of developing cancer when:
[0391] v. the measured expression level of one or more of CTSG, CAP37, ITGB1, CYBB, SYK, DOCK8, COMP, ATG7, SLC2A1, GZMK, ATM, IKBKB, BCAP31, TAPBP, PERM, PLEC, ACSL1, RAC1, GM2A, and PSMB2 is increased when compared to the reference standard when the reference standard is from a stem cell unsuitable for treating cancer; or
[0392] vi. the measured expression level of ANXA1 and/or PPP3CB is decreased when compared to the reference standard, when the reference standard is from a stem cell unsuitable for treating cancer; or
[0393] vii. the measured expression level of one or more of CTSG, CAP37, ITGB1, CYBB, SYK, DOCK8, COMP, ATG7, SLC2A1, GZMK, ATM, IKBKB, BCAP31, TAPBP, PERM, PLEC, ACSL1, RAC1, GM2A, and PSMB2 is increased or the same when compared to the reference standard, when the reference standard is from a stem cell suitable for treating cancer; or
[0394] viii. the measured expression level of ANXA1 and/or PPP3CB is decreased or the same when compared to the reference standard, when the reference standard is from a stem cell suitable for treating cancer.

[0395] In some embodiments of any of the foregoing aspects, the method does not comprise measuring the expression level of CD10 and/or CD101 by a granulocyte or stem cell comprised in a sample from a donor. In some embodiments of any of the foregoing aspects, the method does not comprise comparing the measured expression level of CD10 and/or CD101 with the expression level with the same genes in a reference standard.

[0396] In alternative embodiments, the method comprises measuring the expression level of CD10 and/or CD101 by a granulocyte or stem cell comprised in a sample from a donor. In some embodiments of any of the foregoing aspects, the method comprises comparing the measured expression level of CD10 and/or CD101 with the expression level with the same genes in a reference standard.

[0397] In one aspect the invention provides a composition for treating cancer, the composition comprising stem cells: wherein at least 90% (preferably at least 95%, 99% or 100%) of the stem cells comprised in the composition have:
[0398] a. increased expression of one or more of CTSG, CAP37, ITGB1, CYBB, SYK, DOCK8, COMP, ATG7, SLC2A1, GZMK, ATM, IKBKB, BCAP31, TAPBP, PERM, PLEC, ACSL1, RAC1, GM2A, and PSMB2ITGB1, CYBB, SYK, DOCK8, COMP, ATG7, SLC2A1, GZMK, CTSG, ATM, IKBKB, BCAP31, TAPBP, PERM, PLEC, ACSL1, RAC1, GM2A, CAP37, and PSMB2 when compared to a reference standard, wherein the reference standard is from a stem cell unsuitable for treating cancer; and/or
[0399] b. decreased expression of ANXA1 and/or PPP3CB when compared to a reference standard, wherein the reference standard is from a stem cell unsuitable for treating cancer.

[0400] The invention also provides a method for isolating stem cells suitable for treating cancer based on the expression of one or more genes of the invention. Such methods may provide a substantially homogeneous population of stem cells that are suitable for treating cancer. In one embodiment, stem cells for treating cancer are isolated using the expression of one or more cell-surface expressed polypeptides selected from: ATG7, CYBB, DOCK8, CTSG, S100A9, COMP, S100A8, CTSG, SYK, ITGB1, SLC2A1, GZMK, ANXA1, RAC1, and CAP37, preferably one or more selected from: ATG7, S100A9, COMP, S100A8, CTSG, SYK, ITGB1, SLC2A1, GZMK, ANXA1, RAC1, and CAP37. The isolation may be performed using any suitable technique. In one embodiment a method for isolating granulocytes comprises the use of a binding means that binds to a polypeptide of the invention. Preferably the binding means is an antibody. Antibodies to detect the presence or absence of polypeptides of the invention are commercially available and may be one or more of the antibodies described herein. The method may comprise the use of flow cytometric techniques, preferably fluorescence activated cell sorting (FACS), e.g. together with appropriate ‘gating’. Flow cytometric techniques may be particularly suitable when the method employs the use of a binding means coupled to a detectable label, such as a fluorophore.

[0401] In one aspect there is provided a method for isolating a stem cell for treating cancer, the method comprising:
[0402] a) contacting a sample of stem cells with a binding means, wherein the binding means binds to one or more polypeptides selected from CTSG, CAP37, ITGB1, CYBB, SYK, DOCK8, COMP, ATG7, SLC2A1, GZMK, ATM, IKBKB, BCAP31, TAPBP, PPP3CB, ANXA1, PERM, PLEC, ACSL1, RAC1, GM2A, and PSMB2; and
[0403] b) isolating the stem cell based on the presence or absence of binding between the binding means and the one or more polypeptides.

[0404] Binding may be determined to be present when the amount of binding is statistically significant (e.g. when compared to a ‘background’ control). Binding may be determined to be absent when the amount of binding is statistically insignificant (e.g. when compared to a ‘background’ control). Preferably, binding is determined to be absent when there is no binding whatsoever.

[0405] In one embodiment the invention comprises detecting the presence of one or more polypeptides selected from CTSG, CAP37, ITGB1, CYBB, SYK, DOCK8, COMP, ATG7, SLC2A1, GZMK, ATM, IKBKB, BCAP31, TAPBP, PERM, PLEC, ACSL1, RAC1, GM2A, and PSMB2. When said one or more polypeptides are detected (i.e. where there is binding between the binding means and the polypeptide) the stem cell may be isolated. Suitably, said isolated stem cell may be a stem cell for treating cancer.

[0406] In another embodiment the invention may comprise detecting the absence of ANXA1 and/or PPP3CB (e.g. not detecting ANXA1 and/or PPP3CB). When said one or more polypeptides are not detected (i.e. where there is an absence of binding between the binding means and the polypeptide) the stem cell may be isolated. Suitably, said isolated stem cell may be a stem cell for treating cancer.

[0407] Preferably, the invention comprises detecting:
[0408] the presence of one or more polypeptides selected from CTSG, CAP37, ITGB1, CYBB, SYK, DOCK8, COMP, ATG7, SLC2A1, GZMK, ATM, IKBKB, BCAP31, TAPBP, PERM, PLEC, ACSL1, RAC1, GM2A, and PSMB2; and
[0409] the invention absence of ANXA1 and/or PPP3CB. In one embodiment, when said polypeptides are detected or not detected (as indicated), the stem cell is isolated.

[0410] In one embodiment a method of isolating a stem cell comprises the use of an immobilised binding means (e.g. a binding means conjugated to a bead, such as a magnetic bead, or chromatographic resin) to isolate a stem cell of the invention. Such methods may be immuno-affinity methods.

[0411] The method may comprise quantifying the amount of binding between the binding means and the one or more polypeptides or between the binding means and the stem cell. The method may comprise isolating a stem cell for treating cancer based on the quantified amount of binding.

[0412] In one embodiment a stem cell for treating cancer is isolated when there is a high level of binding between a binding means and one or more polypeptides selected from CTSG, CAP37, ITGB1, CYBB, SYK, DOCK8, COMP, ATG7, SLC2A1, GZMK, ATM, IKBKB, BCAP31, TAPBP, PERM, PLEC, ACSL1, RAC1, GM2A, and PSMB2.

[0413] In one embodiment a stem cell for treating cancer is isolated when there is a low level of binding between a binding means and ANXA1 and/or PPP3CB.

[0414] Preferably, a stem cell for treating cancer is isolated when there is:
[0415] a high level of binding between a binding means and one or more polypeptides selected from CTSG, CAP37, ITGB1, CYBB, SYK, DOCK8, COMP, ATG7, SLC2A1, GZMK, ATM, IKBKB, BCAP31, TAPBP, PERM, PLEC, ACSL1, RAC1, GM2A, and PSMB2; and
[0416] a low level of binding between a binding means and ANXA1 and/or PPP3CB.

[0417] A high/low level of binding is preferably relative to a level of binding between the same binding means and polypeptide under the same conditions for a stem cell that is unsuitable for treating cancer.

[0418] The term “isolating” may mean providing a population of stem cells in which at least 50%, 60%, 70%, 80% or 90% (preferably at least 95%, 99% or 100%) are stem cells suitable for treating cancer. In other words, the term “isolating” may mean removing at least 50%, 60%, 70%, 80% or 90% (preferably at least 95%, 99% or 100%) of stem cells that are unsuitable for treating cancer from a population of stem cells.

[0419] Thus, the methods for isolating suitably allow for the separation of a stem cell for treating cancer from stem cell that is unsuitable for treating cancer.

[0420] In some embodiments a method described herein comprises discarding stem cells that are unsuitable for treating cancer.

[0421] In one aspect the invention provides a stem cell for treating cancer obtainable by a method of the invention (e.g. a stem cell capable of differentiating into granulocytes that are suitable to treat cancer).

[0422] In one aspect there is provided a method for producing a stem cell for treating cancer, the method comprising:
[0423] a. providing a cell; and
[0424] b. converting the cell into a stem cell having an expression profile described herein, for example a stem cell that is capable of differentiating into a granulocyte having an expression profile described herein, e.g. wherein:
   [0425] i. the measured expression level of one or more of GM2A, CTSG, CAP37, ITGB1, CYBB, SYK, DOCK8, COMP, ATG7, SLC2A1, GZMK, ATM, IKBKB, BCAP31, TAPBP, PERM, PLEC, ACSL1, RAC1, and PSMB2 is increased in the granulocyte when compared to a reference standard when the reference standard is from a granulocyte unsuitable for treating cancer; or
   [0426] ii. the measured expression level of ANXA1 and/or PPP3CB is decreased in the granulocyte when compared to the reference standard, when the reference standard is from a granulocyte unsuitable for treating cancer; or
   [0427] iii. the measured expression level of one or more of GM2A, CTSG, CAP37, ITGB1, CYBB, SYK, DOCK8, COMP, ATG7, SLC2A1, GZMK, ATM, IKBKB, BCAP31, TAPBP, PERM, PLEC, ACSL1, RAC1, and PSMB2 is increased or the same when compared to the reference standard, when the reference standard is from a granulocyte suitable for treating cancer; or
   [0428] iv. the measured expression level of ANXA1 and/or PPP3CB is decreased or the same when compared to the reference standard, when the reference standard is from a granulocyte suitable for treating cancer; and
[0429] c. optionally isolating the stem cell.

[0430] In one embodiment the cell is a somatic/differentiated cell, optionally from a donor who produces granulocytes suitable for treating cancer, for example as determined according to a method of the invention.

[0431] In some embodiments of any of the foregoing aspects, a granulocyte unsuitable for treating cancer is a viable granulocyte.

[0432] Embodiments related to the various methods of the invention are intended to be applied equally to other methods, the granulocytes, stem cells, compositions, pharmaceutical compositions or uses, and vice versa.

### SEQUENCE IDENTITY

[0433] Any of a variety of sequence alignment methods can be used to determine percent identity, including, without limitation, global methods, local methods and hybrid methods, such as, e.g., segment approach methods. Protocols to determine percent identity are routine procedures within the scope of one skilled in the art. Global methods align sequences from the beginning to the end of the molecule and determine the best alignment by adding up scores of individual residue pairs and by imposing gap penalties. Non-limiting methods include, e.g., CLUSTAL W, see, e.g., Julie D. Thompson et al., CLUSTAL W: Improving the Sensitivity of Progressive Multiple Sequence Alignment Through Sequence Weighting, Position- Specific Gap Penalties and Weight Matrix Choice, 22(22) Nucleic Acids Research 4673-4680 (1994); and iterative refinement, see, e.g., Osamu Gotoh, Significant Improvement in Accuracy of Multiple Protein. Sequence Alignments by Iterative Refinement as Assessed by Reference to Structural Alignments, 264(4) J. Mol. Biol. 823-838 (1996). Local methods align sequences by identifying one or more conserved motifs shared by all of the input sequences. Non-limiting methods include, e.g., Match-box, see, e.g., Eric Depiereux and Ernest Feytmans, Match-Box: A Fundamentally New Algorithm for the Simultaneous Alignment of Several Protein Sequences, 8(5) CABIOS 501 -509 (1992); Gibbs sampling, see, e.g., C. E. Lawrence et al., Detecting Subtle Sequence Signals: A Gibbs Sampling Strategy for Multiple Alignment, 262(5131) Science 208-214 (1993); Align-M, see, e.g., Ivo Van Walle et al., Align-M - A New Algorithm for Multiple Alignment of Highly Divergent Sequences, 20(9) Bioinformatics: 1428-1435 (2004).

[0434] Thus, percent sequence identity is determined by conventional methods. See, for example, Altschul et al., Bull. Math. Bio. 48: 603-16, 1986 and Henikoff and Henikoff, Proc. Natl. Acad. Sci. USA 89:10915-19, 1992. Briefly, two amino acid sequences are aligned to optimize the alignment scores using a gap opening penalty of 10, a gap extension penalty of 1, and the “blosum 62” scoring matrix of Henikoff and Henikoff (ibid.) as shown below (amino acids are indicated by the standard one-letter codes).

[0435] The “percent sequence identity” between two or more nucleic acid or amino acid sequences is a function of the number of identical positions shared by the sequences. Thus, % identity may be calculated as the number of identical nucleotides / amino acids divided by the total number of nucleotides / amino acids, multiplied by 100. Calculations of % sequence identity may also take into account the number of gaps, and the length of each gap that needs to be introduced to optimize alignment of two or more sequences. Sequence comparisons and the determination of percent identity between two or more sequences can be carried out using specific mathematical algorithms, such as BLAST, which will be familiar to a skilled person.

### ALIGNMENT SCORES FOR DETERMINING SEQUENCE IDENTITY

[0436]

| | A | R | N | D | C | Q | E | G | H | I | L | K | M | F | P | S | T | W | Y | V |
|---|---|---|---|---|---|---|---|---|---|---|---|---|---|---|---|---|---|---|---|---|
| A | 4 | | | | | | | | | | | | | | | | | | | |
| R | -1 | 5 | | | | | | | | | | | | | | | | | | |
| N | -2 | 0 | 6 | | | | | | | | | | | | | | | | | |
| D | -2 | -2 | 1 | 6 | | | | | | | | | | | | | | | | |
| C | 0 | -3 | -3 | -3 | 9 | | | | | | | | | | | | | | | |
| Q | -1 | 1 | 0 | 0 | -3 | 5 | | | | | | | | | | | | | | |
| E | -1 | 0 | 0 | 2 | -4 | 2 | 5 | | | | | | | | | | | | | |
| G | 0 | -2 | 0 | -1 | -3 | -2 | -2 | 6 | | | | | | | | | | | | |
| H | -2 | 0 | 1 | -1 | -3 | 0 | 0 | -2 | 8 | | | | | | | | | | | |
| I | -1 | -3 | -3 | -3 | -1 | -3 | -3 | -4 | -3 | 4 | | | | | | | | | | |
| L | -1 | -2 | -3 | -4 | -1 | -2 | -3 | -4 | -3 | 2 | 4 | | | | | | | | | |
| K | -1 | 2 | 0 | -1 | -3 | 1 | 1 | -2 | -1 | -3 | -2 | 5 | | | | | | | | |
| M | -1 | -1 | -2 | -3 | -1 | 0 | -2 | -3 | -2 | 1 | 2 | -1 | 5 | | | | | | | |
| F | -2 | -3 | -3 | -3 | -2 | -3 | -3 | -3 | -1 | 0 | 0 | -3 | 0 | 6 | | | | | | |
| P | -1 | -2 | -2 | -1 | -3 | -1 | -1 | -2 | -2 | -3 | -3 | -1 | -2 | -4 | 7 | | | | | |
| S | 1 | -1 | 1 | 0 | -1 | 0 | 0 | 0 | -1 | -2 | -2 | 0 | -1 | -2 | -1 | 4 | | | | |
| T | 0 | -1 | 0 | -1 | -1 | -1 | -1 | -2 | -2 | -1 | -1 | -1 | -1 | -2 | -1 | 1 | 5 | | | |
| W | -3 | -3 | -4 | -4 | -2 | -2 | -3 | -2 | -2 | -3 | -2 | -3 | -1 | 1 | -4 | -3 | -2 | 11 | | |
| Y | -2 | -2 | -2 | -3 | -2 | -1 | -2 | -3 | 2 | -1 | -1 | -2 | -1 | 3 | -3 | -2 | -2 | 2 | 7 | |
| V | 0 | -3 | -3 | -3 | -1 | -2 | -2 | -3 | -3 | 3 | 1 | -2 | 1 | -1 | -2 | -2 | 0 | -3 | -1 | 4 |

[0437] The percent identity is then calculated as:

$$\frac{\text{Total number of identical matches}}{\begin{matrix}[ \text{length of the longer sequence plus the} \\ \text{number of gaps introduced into the longer} \\ \text{sequence in order to align the two sequences} ]\end{matrix}} \times 100$$

[0438] Substantially homologous polypeptides are characterized as having one or more amino acid substitutions, deletions or additions. These changes are preferably of a minor nature, that is conservative amino acid substitutions (see below) and other substitutions that do not significantly affect the folding or activity of the polypeptide; small deletions, typically of one to about 30 amino acids; and small amino- or carboxyl-terminal extensions, such as an amino-terminal methionine residue, a small linker peptide of up to about 20-25 residues, or an affinity tag.

CONSERVATIVE AMINO ACID SUBSTITUTIONS

| | |
|---|---|
| Basic: | arginine |
| | lysine |
| | histidine |
| Acidic: | glutamic acid |
| | aspartic acid |
| Polar: | glutamine |
| | asparagine |
| Hydrophobic: | leucine |
| | isoleucine |
| | valine |
| Aromatic: | phenylalanine |
| | tryptophan |
| | tyrosine |
| Small: | glycine |
| | alanine |
| | serine |
| | methionine |

[0439] In addition to the 20 standard amino acids, non-standard amino acids (such as 4-hydroxyproline, 6-N-methyl lysine, 2-aminoisobutyric acid, isovaline and α -methyl serine) may be substituted for amino acid residues of the polypeptides of the present invention. A limited number of non-conservative amino acids, amino acids that are not encoded by the genetic code, and unnatural amino acids may be substituted for polypeptide amino acid residues. The polypeptides of the present invention can also comprise non-naturally occurring amino acid residues.

[0440] Non-naturally occurring amino acids include, without limitation, trans-3-methylproline, 2,4-methano-proline, cis-4-hydroxyproline, trans-4-hydroxy-proline, N-methylglycine, allo-threonine, methyl-threonine, hydroxy-ethylcysteine, hydroxyethylhomo-cysteine, nitro-glutamine, homoglutamine, pipecolic acid, tert-leucine, norvaline, 2-azaphenylalanine, 3-azaphenyl-alanine, 4-azaphenyl-alanine, and 4-fluorophenylalanine. Several methods are known in the art for incorporating non-naturally occurring amino acid residues into proteins. For example, an in vitro system can be employed wherein nonsense mutations are suppressed using chemically aminoacylated suppressor tRNAs. Methods for synthesizing amino acids and aminoacylating tRNA are known in the art. Transcription and translation of plasmids containing nonsense mutations is carried out in a cell free system comprising an E. coli S30 extract and commercially available enzymes and other reagents. Proteins are purified by chromatography. See, for example, Robertson et al., J. Am. Chem. Soc. 113:2722, 1991; Ellman et al., Methods Enzymol. 202:301, 1991; Chung et al., Science 259:806-9, 1993; and Chung et al., Proc. Natl. Acad. Sci. USA 90:10145-9, 1993). In a second method, translation is carried out in Xenopus oocytes by microinjection of mutated mRNA and chemically aminoacylated suppressor tRNAs (Turcatti et al., J. Biol. Chem. 271:19991-8, 1996). Within a third method, E. coli cells are cultured in the absence of a natural amino acid that is to be replaced (e.g., phenylalanine) and in the presence of the desired non-naturally occurring amino acid(s) (e.g., 2-azaphenylalanine, 3-azaphenylalanine, 4-azaphenylalanine, or 4-fluorophenylalanine). The non-naturally occurring amino acid is incorporated into the polypeptide in place of its natural counterpart. See, Koide et al., Biochem. 33:7470-6, 1994. Naturally occurring amino acid residues can be converted to non-naturally occurring species by in vitro chemical modification. Chemical modification can be combined with site-directed mutagenesis to further expand the range of substitutions (Wynn and Richards, Protein Sci. 2:395-403, 1993).

[0441] A limited number of non-conservative amino acids, amino acids that are not encoded by the genetic code, non-naturally occurring amino acids, and unnatural amino acids may be substituted for amino acid residues of polypeptides of the present invention.

[0442] Essential amino acids in the polypeptides of the present invention can be identified according to procedures known in the art, such as site-directed mutagenesis or alanine-scanning mutagenesis (Cunningham and Wells, Science 244: 1081-5, 1989). Sites of biological interaction can also be determined by physical analysis of structure, as determined by such techniques as nuclear magnetic resonance, crystallography, electron diffraction or photoaffinity labeling, in conjunction with mutation of putative contact site amino acids. See, for example, de Vos et al., Science 255:306-12, 1992; Smith et al., J. Mol. Biol. 224:899-904, 1992; Wlodaver et al., FEBS Lett. 309:59-64, 1992. The identities of essential amino acids can also be inferred from analysis of homologies with related components (e.g. the translocation or protease components) of the polypeptides of the present invention.

[0443] Multiple amino acid substitutions can be made and tested using known methods of mutagenesis and screening, such as those disclosed by Reidhaar-Olson and Sauer (Science 241:53-7, 1988) or Bowie and Sauer (Proc. Natl. Acad. Sci. USA 86:2152-6, 1989). Briefly, these authors disclose methods for simultaneously randomizing two or more positions in a polypeptide, selecting for functional polypeptide, and then sequencing the mutagenized polypeptides to determine the spectrum of allowable substitutions at each position. Other methods that can be used include phage display (e.g., Lowman et al., Biochem. 30:10832-7, 1991; Ladner et al., U.S. Patent No. 5,223,409; Huse, WIPO Publication WO 92/06204) and region-directed mutagenesis (Derbyshire et al., Gene 46:145, 1986; Ner et al., DNA 7:127, 1988).

[0444] Unless defined otherwise, all technical and scientific terms used herein have the same meaning as commonly understood by one of ordinary skill in the art to which this disclosure belongs. Singleton, et al., DICTIONARY OF MICROBIOLOGY AND MOLECULAR BIOLOGY, 20 ED., John Wiley and Sons, New York (1994), and Hale & Marham, THE HARPER COLLINS DICTIONARY OF BIOLOGY, Harper Perennial, NY (1991) provide the skilled person with a general dictionary of many of the terms used in this disclosure.

[0445] This disclosure is not limited by the exemplary methods and materials disclosed herein, and any methods and materials similar or equivalent to those described herein can be used in the practice or testing of embodiments of this disclosure. Numeric ranges are inclusive of the numbers defining the range. Unless otherwise indicated, any nucleic acid sequences are written left to right in 5′ to 3′ orientation; amino acid sequences are written left to right in amino to carboxy orientation, respectively.

[0446] The headings provided herein are not limitations of the various aspects or embodiments of this disclosure.

[0447] Amino acids are referred to herein using the name of the amino acid, the three letter abbreviation or the single letter abbreviation. The term “protein”, as used herein, includes proteins, polypeptides, and peptides. As used herein, the term “amino acid sequence” is synonymous with the term “polypeptide” and/or the term “protein”. In some instances, the term “amino acid sequence” is synonymous with the term “peptide”. In some instances, the term “amino acid sequence” is synonymous with the term “enzyme”. The terms “protein” and “polypeptide” are used interchangeably herein. In the present disclosure and claims, the conventional one-letter and three-letter codes for amino acid residues may be used. The 3-letter code for amino acids as defined in conformity with the IUPACIUB Joint Commission on Biochemical Nomenclature (JCBN). It is also understood that a polypeptide may be coded for by more than one nucleotide sequence due to the degeneracy of the genetic code.

[0448] Other definitions of terms may appear throughout the specification. Before the exemplary embodiments are described in more detail, it is to be understood that this disclosure is not limited to particular embodiments described, and as such may vary. It is also to be understood that the terminology used herein is for the purpose of describing particular embodiments only, and is not intended to be limiting, since the scope of the present disclosure will be defined only by the appended claims.

[0449] Where a range of values is provided, it is understood that each intervening value, to the tenth of the unit of the lower limit unless the context clearly dictates otherwise, between the upper and lower limits of that range is also specifically disclosed. Each smaller range between any stated value or intervening value in a stated range and any other stated or intervening value in that stated range is encompassed within this disclosure. The upper and lower limits of these smaller ranges may independently be included or excluded in the range, and each range where either, neither or both limits are included in the smaller ranges is also encompassed within this disclosure, subject to any specifically excluded limit in the stated range. Where the stated range includes one or both of the limits, ranges excluding either or both of those included limits are also included in this disclosure.

[0450] It must be noted that as used herein and in the appended claims, the singular forms “a”, “an”, and “the” include plural referents unless the context clearly dictates otherwise. Thus, for example, reference to “a granulocyte” includes a plurality of such candidate agents and reference to “the granulocyte” includes reference to one or more granulocytes and equivalents thereof known to those skilled in the art, and so forth.

[0451] The publications discussed herein are provided solely for their disclosure prior to the filing date of the present application. Nothing herein is to be construed as an admission that such publications constitute prior art to the claims appended hereto.

### BRIEF DESCRIPTION OF THE DRAWINGS

[0452] Embodiments of the invention will now be described, by way of example only, with reference to the following Figures and Examples.

[0453] FIG. 1 shows the distribution of different types of neutrophils in the general population. Defective neutrophils are characterised by an anti-inflammatory and proangiogenic phenotype whereas healthy neutrophils are characterised by a proinflammatory and antiangiogenic phenotype. Finally, exceptional neutrophils are present in a proportion of the general population and exhibit the extreme of all qualities found in healthy neutrophils.

[0454] FIG. 2 shows significantly (***P < 0.001, **P < 0.01, *P < 0.05) upregulated expression of ITGB1, SYK, DOCK8 and CYBB in high CKA neutrophils (>80% CKA) compared with low CKA control neutrophils. Data are mean (n = 3 donor samples in duplicate) ± standard error of mean compared by two-way ANOVA.

[0455] FIG. 3 shows significantly (**P < 0.01, *P < 0.05) upregulated expression of PLEC and COMP in high CKA neutrophils (>80% CKA) compared with low CKA control neutrophils. Data are mean (n = 3 donor samples in duplicate) ± standard error of mean compared by two-way ANOVA.

[0456] FIG. 4 shows significantly (**P < 0.01, *P < 0.05) upregulated expression of ATG7, SLC2A1, S100A9, ACSL1, CTSG, PSMB2, ATM and S100A8 in high CKA neutrophils (>80% CKA) compared with low CKA control neutrophils. Data are mean (n = 3 donor samples in duplicate) ± standard error of mean compared by two-way ANOVA.

[0457] FIG. 5 shows significantly (**P < 0.01, *P < 0.05) downregulated expression of ANXA1 in high CKA neutrophils (>80% CKA) compared with low CKA control neutrophils. Data are mean (n = 3 donor samples in duplicate) ± standard error of mean compared by two-way ANOVA.

[0458] FIG. 6 shows significantly (**P < 0.01, *P < 0.05) upregulated expression of BCAP31 and TAPBP in high CKA neutrophils (>80% CKA) compared with low CKA control neutrophils. Data are mean (n = 3 donor samples in duplicate) ± standard error of mean compared by two-way ANOVA.

### SEQUENCE LISTING

[0459] Gene Sequences

| SEQ ID NO. | GENE | Accession No. | Ensembl Release No. |
|---|---|---|---|
| 1 | CTSG | ENSG00000100448 | 97 |
| 2 | CAP37 | ENSG00000172232 | 97 |
| 3 | ITGB1 | ENSG00000150093 | 97 |
| 4 | CYBB | ENSG00000165168 | 97 |
| 5 | SYK | ENSG00000165025 | 97 |
| 6 | DOCK8 | ENSG00000107099 | 97 |
| 7 | COMP | ENSG00000105664 | 97 |
| 8 | ATG7 | ENSG00000197548 | 97 |
| 9 | SLC2A1 | ENSG00000117394 | 97 |
| 10 | GZMK | ENSG00000113088 | 97 |
| 11 | S100A9 | ENSG00000163220 | 97 |
| 12 | S100A8 | ENSG00000143546 | 97 |
| 13 | ATM | ENSG00000149311 | 97 |
| 14 | IKBKB | ENSG00000104365 | 97 |
| 15 | BCAP31 | ENSG00000185825 | 97 |
| 16 | TAPBP | ENSG00000231925 | 97 |
| 17 | PPP3CB | ENSG00000107758 | 97 |
| 18 | ANXA1 | ENSG00000135046 | 97 |
| 19 | PERM | ENSG00000005381 | 97 |
| 20 | PLEC | ENSG00000178209 | 97 |
| 21 | ACSL1 | ENSG00000151726 | 97 |
| 22 | RAC1 | ENSG00000136238 | 97 |
| 23 | PSMB2 | ENSG00000126067 | 97 |

### POLYPEPTIDE SEQUENCES

[0460]

| | | | | | | |
|---|---|---|---|---|---|---|
| SEQ ID NO. | POLYPEPTIDE | ISOFORM | UniProt ID | UniProt Version Number | SEQUENCE | |
| 25 | CTSG | 1 | P08311 | Entry version 191 (18 Sep. 2019) Sequence version 2 (01 Jan. 1990) | MQPLLLLLAF IIGGRESRPH QSPAGQSRCG TAAHCWGSNI RRENTQQHIT NQRTIQNDIM NRNVNPVALP LCTVAGWGRV EVQLRVQRDR PRRQICVGDR SGGPLLCNNV AHGIVSYGKS TMRSFKLLDQ | LLPTGAEAGE SRPYMAYLQI GFLVREDFVL NVTLGAHNIQ ARRAIRHPQY LLQLSRRVRR RAQEGLRPGT SMRRGTDTLR QCLRIFGSYD RERKAAFKGD SGVPPEVFTR VSSFLPWIRT METPL |
| 26 | CAP37 | 1 | P20160 | Entry version 191 (18 Sep. 2019) Sequence version 3 (01 Oct. 1993) | MTRLTVLALL SSPLLDIVGG LASIQNQGRH FVMTAASCFQ LGAYDLRRRE SMSENGYDPQ LDREANLTSS ATVEAGTRCQ GRLSRFPRFV RPNNVCTGVL GGTPLVCEGL PCGRGPDFFT GVLNNPGPGP | AGLLASSRAG RKARPRQFPF FCGGALIHAR SQNPGVSTVV RQSRQTFSIS QNLNDLMLLQ VTILPLPLQN VAGWGSQRSG NVTVTPEDQC TRRGGICNGD AHGVASFSLG RVALFRDWID A |
| 27 | ITGB1 | 1 | P05556 | Entry version 242 (18 Sep. 2019) Sequence version 2 (16 Dec. 2008) | MNLQPIFWIG QTDENRCLKA AGPNCGWCTN SARCDDLEAL ENPRGSKDIK GTAEKLKPED LRLRSGEPQT YPIDLYYLMD NVKSLGTDLM RIGFGSFVEK | LISSVCCVFA NAKSCGECIQ STFLQEGMPT KKKGCPPDDI KNKNVTNRSK ITQIQPQQLV FTLKFKRAED LSYSMKDDLE NEMRRITSDF TVMPYISTTP |
| 27 | ITGB1 | 1 | P05556 | Entry version 242 (18 Sep. 2019) Sequence version 2 (16 Dec. 2008) | MNLQPIFWIG QTDENRCLKA AGPNCGWCTN SARCDDLEAL ENPRGSKDIK GTAEKLKPED LRLRSGEPQT YPIDLYYLMD NVKSLGTDLM RIGFGSFVEK | LISSVCCVFA NAKSCGECIQ STFLQEGMPT KKKGCPPDDI KNKNVTNRSK ITQIQPQQLV FTLKFKRAED LSYSMKDDLE NEMRRITSDF TVMPYISTTP |
| | | | | | AKLRNPCTSE NVLSLTNKGE ISGNLDSPEG CGSLIGWRNV GFHFAGDGKL CHLENNMYTM HLVQKLSENN FQPVYKELKN SANSSNVIQL EVILENGKLS CKNGVNGTGE GDEVQFEISI DSFKIRPLGF ICECECQSEG NGTFECGACR ECSTDEVNSE SSEICSNNGE RDNTNEIYSG DRSNGLICGG CNPNYTGSAC ASNGQICNGR TDPKFQGQTC AEHKECVQCR CTQECSYFNI QPVQPDPVSH FYFTYSVNGN PECPTGPDII VLIGLALLLI REFAKFEKEK PIYKSAVTTV | QNCTSPFSYK VFNELVGKQR GFDAIMQVAV TRLLVFSTDA GGIVLPNDGQ SHYYDYPSIA IQTIFAVTEE LIPKSAVGTL IIDAYNSLSS EGVTISYKSY NGRKCSNISI TSNKCPKKDS TEEVEVILQY IPESPKCHEG CNEGRVGRHC DMDAYCRKEN CVCGQCVCRK KFCECDNFNC NGVCKCRVCE DCSLDTSTCE GICECGVCKC EMCQTCLGVC AFNKGEKKDT TKVESRDKLP CKEKDVDDCW NEVMVHVVEN PIVAGVVAGI WKLLMIIHDR MNAKWDTGEN VNPKYEGK |
| 28 | ITGB1 | 2 | P055562 | Entry version 242 (18 Sep. 2019) Sequence version 2 (16 Dec. 2008) | MNLQPIFWIG QTDENRCLKA AGPNCGWCTN SARCDDLEAL ENPRGSKDIK GTAEKLKPED LRLRSGEPQT YPIDLYYLMD NVKSLGTDLM RIGFGSFVEK AKLRNPCTSE NVLSLTNKGE ISGNLDSPEG CGSLIGWRNV GFHFAGDGKL CHLENNMYTM HLVQKLSENN FQPVYKELKN SANSSNVIQL EVILENGKLS CKNGVNGTGE GDEVQFEISI DSFKIRPLGF ICECECQSEG NGTFECGACR ECSTDEVNSE SSEICSNNGE RDNTNEIYSG DRSNGLICGG | LISSVCCVFA NAKSCGECIQ STFLQEGMPT KKKGCPPDDI KNKNVTNRSK ITQIQPQQLV FTLKFKRAED LSYSMKDDLE NEMRRITSDF TVMPYISTTP QNCTSPFSYK VFNELVGKQR GFDAIMQVAV TRLLVFSTDA GGIVLPNDGQ SHYYDYPSIA IQTIFAVTEE LIPKSAVGTL IIDAYNSLSS EGVTISYKSY NGRKCSNISI TSNKCPKKDS TEEVEVILQY IPESPKCHEG CNEGRVGRHC DMDAYCRKEN CVCGQCVCRK KFCECDNFNC NGVCKCRVCE |
| | | | | | CNPNYTGSAC ASNGQICNGR TDPKFQGQTC AEHKECVQCR CTQECSYFNI QPVQPDPVSH FYFTYSVNGN PECPTGPDII VLIGLALLLI REFAKFEKEK KTSKKQSGL | DCSLDTSTCE GICECGVCKC EMCQTCLGVC AFNKGEKKDT TKVESRDKLP CKEKDVDDCW NEVMVHVVEN PIVAGVVAGI WKLLMIIHDR MNAKWDTVSY |
| 29 | ITGB1 | 3 | P055563 | Entry version 242 (18 Sep. 2019) Sequence version 2 (16 Dec. 2008) | MNLQPIFWIG QTDENRCLKA AGPNCGWCTN SARCDDLEAL ENPRGSKDIK GTAEKLKPED LRLRSGEPQT YPIDLYYLMD NVKSLGTDLM RIGFGSFVEK AKLRNPCTSE NVLSLTNKGE ISGNLDSPEG CGSLIGWRNV GFHFAGDGKL CHLENNMYTM HLVQKLSENN FQPVYKELKN SANSSNVIQL EVILENGKLS CKNGVNGTGE GDEVQFEISI DSFKIRPLGF ICECECQSEG NGTFECGACR ECSTDEVNSE SSEICSNNGE RDNTNEIYSG DRSNGLICGG CNPNYTGSAC ASNGQICNGR TDPKFQGQTC AEHKECVQCR CTQECSYFNI QPVQPDPVSH FYFTYSVNGN PECPTGPDII VLIGLALLLI REFAKFEKEK VAQPGVQWCD FQQFSCLSLP FIRVP | LISSVCCVFA NAKSCGECIQ STFLQEGMPT KKKGCPPDDI KNKNVTNRSK ITQIQPQQLV FTLKFKRAED LSYSMKDDLE NEMRRITSDF TVMPYISTTP QNCTSPFSYK VFNELVGKQR GFDAIMQVAV TRLLVFSTDA GGIVLPNDGQ SHYYDYPSIA IQTIFAVTEE LIPKSAVGTL IIDAYNSLSS EGVTISYKSY NGRKCSNISI TSNKCPKKDS TEEVEVILQY IPESPKCHEG CNEGRVGRHC DMDAYCRKEN CVCGQCVCRK KFCECDNFNC NGVCKCRVCE DCSLDTSTCE GICECGVCKC EMCQTCLGVC AFNKGEKKDT TKVESRDKLP CKEKDVDDCW NEVMVHVVEN PIVAGVVAGI WKLLMIIHDR MNAKWDTSLS ISSLQPLTSR STWDYRVKIL |
| 30 | ITGB1 | 4 | P055564 | Entry version 242 (18 Sep. 2019) Sequence version 2 (16 Dec. 2008) | MNLQPIFWIG QTDENRCLKA AGPNCGWCTN SARCDDLEAL ENPRGSKDIK GTAEKLKPED | LISSVCCVFA NAKSCGECIQ STFLQEGMPT KKKGCPPDDI KNKNVTNRSK ITQIQPQQLV |
| | | | | | LRLRSGEPQT YPIDLYYLMD NVKSLGTDLM RIGFGSFVEK AKLRNPCTSE NVLSLTNKGE ISGNLDSPEG CGSLIGWRNV GFHFAGDGKL CHLENNMYTM HLVQKLSENN FQPVYKELKN SANSSNVIQL EVILENGKLS CKNGVNGTGE GDEVQFEISI DSFKIRPLGF ICECECQSEG NGTFECGACR ECSTDEVNSE SSEICSNNGE RDNTNEIYSG DRSNGLICGG CNPNYTGSAC ASNGQICNGR TDPKFQGQTC AEHKECVQCR CTQECSYFNI QPVQPDPVSH FYFTYSVNGN PECPTGPDII VLIGLALLLI REFAKFEKEK QWCDISSLQP LSLPSTWDYR | FTLKFKRAED LSYSMKDDLE NEMRRITSDF TVMPYISTTP QNCTSPFSYK VFNELVGKQR GFDAIMQVAV TRLLVFSTDA GGIVLPNDGQ SHYYDYPSIA IQTIFAVTEE LIPKSAVGTL IIDAYNSLSS EGVTISYKSY NGRKCSNISI TSNKCPKKDS TEEVEVILQY IPESPKCHEG CNEGRVGRHC DMDAYCRKEN CVCGQCVCRK KFCECDNFNC NGVCKCRVCE DCSLDTSTCE GICECGVCKC EMCQTCLGVC AFNKGEKKDT TKVESRDKLP CKEKDVDDCW NEVMVHVVEN PIVAGVVAGI WKLLMIIHDR MNAKWDTPGV LTSRFQQFSC VKILFIRVP |
| 31 | ITGB1 | 5 | P055565 | Entry version 242 (18 Sep. 2019) Sequence version 2 (16 Dec. 2008) | MNLQPIFWIG QTDENRCLKA AGPNCGWCTN SARCDDLEAL ENPRGSKDIK GTAEKLKPED LRLRSGEPQT YPIDLYYLMD NVKSLGTDLM RIGFGSFVEK AKLRNPCTSE NVLSLTNKGE ISGNLDSPEG CGSLIGWRNV GFHFAGDGKL CHLENNMYTM HLVQKLSENN FQPVYKELKN SANSSNVIQL EVILENGKLS CKNGVNGTGE GDEVQFEISI DSFKIRPLGF ICECECQSEG NGTFECGACR | LISSVCCVFA NAKSCGECIQ STFLQEGMPT KKKGCPPDDI KNKNVTNRSK ITQIQPQQLV FTLKFKRAED LSYSMKDDLE NEMRRITSDF TVMPYISTTP QNCTSPFSYK VFNELVGKQR GFDAIMQVAV TRLLVFSTDA GGIVLPNDGQ SHYYDYPSIA IQTIFAVTEE LIPKSAVGTL IIDAYNSLSS EGVTISYKSY NGRKCSNISI TSNKCPKKDS TEEVEVILQY IPESPKCHEG CNEGRVGRHC |
| | | | | | ECSTDEVNSE SSEICSNNGE RDNTNEIYSG DRSNGLICGG CNPNYTGSAC ASNGQICNGR TDPKFQGQTC AEHKECVQCR CTQECSYFNI QPVQPDPVSH FYFTYSVNGN PECPTGPDII VLIGLALLLI REFAKFEKEK PIYKSPINNF L | DMDAYCRKEN CVCGQCVCRK KFCECDNFNC NGVCKCRVCE DCSLDTSTCE GICECGVCKC EMCQTCLGVC AFNKGEKKDT TKVESRDKLP CKEKDVDDCW NEVMVHVVEN PIVAGVVAGI WKLLMIIHDR MNAKWDTQEN KNPNYGRKAG |
| 32 | CYBB | 1 | P04839 | Entry version 213 (18 Sep. 2019) Sequence version 2 (23 Jan. 2007) | MGNWAVNEGL LNVFLFVWYY YTRKLLGSAL NFNCMLILLP GSSACCSTRV HKMVAWMIAL FNVEWCVNAR LSELGDRQNE KNPEGGLYLA VITLCLILII YFEVFWYTHH IHGAERIVRG ITVCEQKISE QFAGNPPMTW LCERLVRFWR VTHPFKTIEL VGQYIFVKCP TLTSAPEEDF WTEGLFNACG KLPKIAVDGP YEVVMLVGAG KSVWYKYCNN FYWLCRDTHA LESQMQERNN TGWDESQANH VITGLKQKTL KTIASQHPNT ALAETLSKQS VHFIFNKENF | SIFVILVWLG RVYDIPPKFF ALARAPAACL VCRNLLSFLR RRQLDRNLTF HSAIHTIAHL VNNSDPYSVA SYLNFARKRI VTLLAGITGV TSSTKTIRRS LFVIFFIGLA QTAESLAVHN WGKIKECPIP KWIVGPMFLY SQQKWITKV QMKKKGFKME KVSKLEWHPF FSIHIRIVGD CDKQEFQDAW FGTASEDVFS IGVTPFASIL ATNLKLKKIY FEWFADLLQL AGFLSYNIYL FAVHHDEEKD YGRPNWDNEF RIGVFLCGPE ISNSESGPRG |
| 33 | SYK | 1 | P43405 | Entry version 224 (18 Sep. 2019) Sequence version 1 (01 Nov. 1995) | MASSGMADSA TREEAEDYLV LRQSRNYLGG AHHYTIEREL THASPADLCH CLLKKPFNRP EDLKENLIRE QALEQAIISQ TAHEKMPWFH IVLIGSKTNG GSYALCLLHE DKTGKLSIPE VEHYSYKADG | NHLPFFFGNI QGGMSDGLYL FALSVAHGRK NGTYAIAGGR YHSQESDGLV QGVQPKTGPF YVKQTWNLQG KPQLEKLIAT GKISREESEQ KFLIRARDNN GKVLHYRIDK GKKFDTLWQL LLRVLTVPCQ |
| | | | | | KIGTQGNVNF PATWSAGGII PGHRKSSPAQ NPYEPELAPW LPMDTEVYES KEVYLDRKLL NFGTVKKGYY VKILKNEAND ANVMQQLDNP AESWMLVMEM QQNRHVKDKN GMKYLEESNF LLVTQHYAKI ADENYYKAQT PECINYYKFS LMWEAFSYGQ VTAMLEKGER MYDLMNLCWT AVELRLRNYY | GGRPQLPGSH SRIKSYSFPK GNRQESTVSF AADKGPQREA PYADPEEIRP TLEDKELGSG QMKKVVKTVA PALKDELLAE YIVRMIGICE AELGPLNKYL IIELVHQVSM VHRDLAARNV SDFGLSKALR HGKWPVKWYA SKSDVWSFGV KPYRGMKGSE MGCPAGCPRE YDVENRPGFA YDVVN |
| 34 | SYK | 2 | P434052 | Entry version 224 (18 Sep. 2019) Sequence version 1 (01 Nov. 1995) | MASSGMADSA TREEAEDYLV LRQSRNYLGG AHHYTIEREL THASPADLCH CLLKKPFNRP EDLKENLIRE QALEQAIISQ TAHEKMPWFH IVLIGSKTNG GSYALCLLHE DKTGKLSIPE VEHYSYKADG KIGTQGNVNF PASSPAQGNR EPELAPWAAD DTEVYESPYA YLDRKLLTLE TVKKGYYQMK LKNEANDPAL MQQLDNPYIV WMLVMEMAEL RHVKDKNIIE YLEESNFVHR TQHYAKISDF NYYKAQTHGK INYYKFSSKS EAFSYGQKPY MLEKGERMGC LMNLCWTYDV LRLRNYYYDV | NHLPFFFGNI QGGMSDGLYL FALSVAHGRK NGTYAIAGGR YHSQESDGLV QGVQPKTGPF YVKQTWNLQG KPQLEKLIAT GKISREESEQ KFLIRARDNN GKVLHYRIDK GKKFDTLWQL LLRVLTVPCQ GGRPQLPGSH QESTVSFNPY KGPQREALPM DPEEIRPKEV DKELGSGNFG KVVKTVAVKI KDELLAEANV RMIGICEAES GPLNKYLQQN LVHQVSMGMK DLAARNVLLV GLSKALRADE WPVKWYAPEC DVWSFGVLMW RGMKGSEVTA PAGCPREMYD ENRPGFAAVE VN |
| 35 | DOCK8 | 1 | Q8NF50 | Entry version 160 (18 Sep. 2019) Sequence version 3 (21 Aug. 2007) | MATLPSAERR SAEIRKQFTL SISTSGFPSL PVDFEGLLMT QELGDFTDDD RTLQPSLPEE CVQTYIREWL EICGFKKTGS | AFALKINRYS PPNLGQYHRQ QLPQFYDPVE HLNSLDVQLA LDVVFTPKEC GVELDPHVRD IVNRKNQGSP RKDFHKTLPK |
| | | | | | QTFESETLEC HLNVLCDVSG LRSLQPDKRL DFEKQNEEAR LYPSVDEEDA KEHLGNRILV IEPLFASIAL ENFHCDLNSD PSVAASSQAR SDIYLVVKIE CAEPYTVIKE EKLKLQAESF FAWAPISLSS VTDVDSVVGR QSRRLSERAL FKTSTLSVSS DEDLFKFLAD VKSIPGLLRL CCLTPEMLPV HKEILEFPTR NLLYVYPQRL NITIKIQFMC IFGKSSGPEF HNKSPDFYEE VNHHLLFTFY SVETLLGYSW TGSYCLPVAL SAEKVPLQNP VFNIEVQAVS KFFTLCHSLE DQKISEMALE NSSRLEPLVL QLSVQPMVIA FESVVAIANS QHGRNCLLAS VQRDVPKSGA HTYGRTSAAA MSSSNPDLAG NIMSSKIADR GSSDAPSSPA HEELALQMW KYAWFFFELL MDKRDSFRRT TTIVNVVTSE ENEQAEKMNI SLMDRGFVFN AKLSNLPTLI CSHEHYLNLN TSPCPSISSQ QKIASMFDLT GLLFTELAAA VQRKAVSAIH RCVKPEVKVK IILDALPQLC RTSGSDEEQE LAIAGNNFNL PYKQYNMLNA LWIMKNADQS STQLNRILDL KGKQSSDKVS | SEPAAQAGPR KGPVTACDFD ENLLQQVSAE RTNRQAELFA VEIRPVPECP KLLTLKFEIE YDVKERKKIS QFKGFLRAHT SAVFSVTYPS KVLQQGEIGD SDGGKSKEKI CQRLGKYRMP FFNVSTLERE SSVGERRTLA SLEENGVGSN FFKQEGDRLS YKRSSSLQRR EISTAPEIIN KPFPENRTRP EVYVPHTVYR NFVNKLASAR GEDASNAMPV LQEVYTAVTY VKIKLPAKLT HISCQQKQGA LPILLNERLQ EKLPPNYSMH PIKWAEGHKG SVHTQDNHLE SQVTFPIRVL HELKLSIICL FLHLVLDKLF GQTANFSQFA LHNSKDLSKD YVHYVFRLPE PTALLDPRSY VSSKLLQARV THSAADEEVK NCSRMSYYCS APRPASKKHF STGMVRETVF VKSMAQHVHN RFSDRFMDDI IAALLVKPQK SLAFFLYDLL LIRHYCSQLS SMRLEFLRIL LFFMNADTAP NSSSCSSFQD SEYRQQHFLT LDAEGEGISK SLLSSHDLDP IAALYLPLVG DFTVADTRRY GAGAINQNVA KTSGIVLSSL DTTRNLMICF LIRKWIADLP LFICVLCFEY TQVLQKSRDV |
| | | | | | KARLEEALLR EQTHWRQANE QEALISGNLA QENIIQASSA VLRVLVNSLN CFATLRALIA VEQCFDLCHQ VTRSQACATL TSNFARVKMQ RAPDFNEEHL SEEDTAMQMT CNLNSILYDT EMLMDLMYRI RLTWLQNMAE AAMCLVHAAA DHSYLPVGSV EESVVSEDTL QYFTESGLVG TGGLYETVNE AHREFRKLTL SIVNKDHKRM GSKFGDLDEQ KLPEISHRLE FVEVIKDSTP AYIQITFVEP YFDEYEMKDR VTYFEKNFNL LEGRPRGELH TMHAFPYIKT VLTPIEVAIE VAINQEPPDA VGATVNQGPL PADPKLYRHH IMRCGEAVEK EYQQELKKNY IERKIPELYK DSFHRSSFRK | GEGARGEMMR RRAPGNDRFP GLNENLRWKK KLDKTKAELD TEAHLIILDM LDCKDSLLGG CDQSTTYLTH KFGDLLFEEE VLHHCSSSMD YLLMRFSFGA VTMSLASLVG RRSLRTILAY PFPTQVEELL VKMREFQEDP AKSYQASPDL KHTKKKCYTE LVAEYLSMLE SFQNISSNVL SPDEDGVCAG LLEQAAELFS VYKLVIPILE THSKLQRAFD FGTYFRVGFF EFVYKEPAIT AFYGQCFGAE VDKTKLDPNK RRFMYTTPFT EQYRRNTVLT RISVIQKEEF DMKKKTLQLA KMLQMVLQGS EVAQVFLAEI NKLRLCFKEF NKRLITADQR NKLKENLRPM PIFRVESQKR CETQLSQGS |
| 36 | DOCK8 | 2 | Q8NF502 | Entry version 160 (18 Sep. 2019) Sequence version 3 (21 Aug. 2007) | MATLPSAERR SAEIRKQFTL SISTSGFPSL PVDFEGLLMT QELGDFTDDD RTLQPSLPEE CVQTYIREWL EICGFKKTGS QTFESETLEC HLNVLCDVSG LRSLQPDKRL DFEKQNEEAR LYPSVDEEDA KEHLGNRILV IEPLFASIAL ENFHCDLNSD PSVAASSQAR SDIYLVVKIE CAEPYTVIKE EKLKLQAESF FAWAPISLSS VTDVDSVVGR | AFALKINRYS PPNLGQYHRQ QLPQFYDPVE HLNSLDVQLA LDVVFTPKEC GVELDPHVRD IVNRKNQGSP RKDFHKTLPK SEPAAQAGPR KGPVTACDFD ENLLQQVSAE RTNRQAELFA VEIRPVPECP KLLTLKFEIE YDVKERKKIS QFKGFLRAHT SAVFSVTYPS KVLQQGEIGD SDGGKSKEKI CQRLGKYRMP FFNVSTLERE SSVGERRTLA |
| | | | | | QSRRLSERAL FKTSTLSVSS DEDLFKFLAD VKSIPGLLRL CCLTPEMLPV HKEILEFPTR NLLYVYPQRL NITIKIQFMC IFGKSSGPEF HNKSPDFYEE VNHHLLFTFY SVETLLGYSW TGSYCLPVAL SAEKVPLQNP VFNIEVQAVS KFFTLCHSLE DQKISEMALE NSSRLEPLVL QLSVQPMVIA FESVVAIANS QHGRNCLLAS VQRDVPKSGA HTYGRTSAAA MSSSNPDLAG NIMSSKHFHE GMVRETVFKY SMAQHVHNMD SDRFMDDITT ALLVKPQKEN AFFLYDLLSL RHYCSQLSAK RLEFLRILCS FMNADTAPTS SSCSSFQDQK YRQQHFLTGL AEGEGISKVQ LSSHDLDPRC ALYLPLVGII TVADTRRYRT GAINQNVALA SGIVLSSLPY TRNLMICFLW RKWIADLPST ICVLCFEYKG VLQKSRDVKA GARGEMMRRR NENLRWKKEQ DKTKAELDQE AHLIILDMQE CKDSLLGGVL QSTTYLTHCF GDLLFEEEVE HHCSSSMDVT LMRFSFGATS MSLASLVGRA SLRTILAYSE PTQVEELLCN MREFQEDPEM SYQASPDLRL TKKKCYTEAA | SLEENGVGSN FFKQEGDRLS YKRSSSLQRR EISTAPEIIN KPFPENRTRP EVYVPHTVYR NFVNKLASAR GEDASNAMPV LQEVYTAVTY VKIKLPAKLT HISCQQKQGA LPILLNERLQ EKLPPNYSMH PIKWAEGHKG SVHTQDNHLE SQVTFPIRVL HELKLSIICL FLHLVLDKLF GQTANFSQFA LHNSKDLSKD YVHYVFRLPE PTALLDPRSY VSSKLLQARV THSAADEEVK ELALQMVVST AWFFFELLVK KRDSFRRTRF IVNVVTSEIA EQAEKMNISL MDRGFVFNLI LSNLPTLISM HEHYLNLNLF PCPSISSQNS IASMFDLTSE LFTELAAALD RKAVSAIHSL VKPEVKVKIA LDALPQLCDF SGSDEEQEGA IAGNNFNLKT KQYNMLNADT IMKNADQSLI QLNRILDLLF KQSSDKVSTQ RLEEALLRGE APGNDRFPGL THWRQANEKL ALISGNLATE NIIQASSALD RVLVNSLNCD ATLRALIAKF QCFDLCHQVL RSQACATLYL NFARVKMQVT PDFNEEHLRR EDTAMQMTPF LNSILYDTVK LMDLMYRIAK TWLQNMAEKH MCLVHAAALV |
| | | | | | AEYLSMLEDH QNISSNVLEE DEDGVCAGQY EQAAELFSTG KLVIPILEAH SKLQRAFDSI TYFRVGFFGS VYKEPAITKL YGQCFGAEFV KTKLDPNKAY DEYEMKDRVT FMYTTPFTLE YRRNTVLTTM SVIQKEEFVL KKKTLQLAVA LQMVLQGSVG AQVFLAEIPA LRLCFKEFIM RLITADQREY LKENLRPMIE FRVESQKRDS TQLSQGS | SYLPVGSVSF SVVSEDTLSP FTESGLVGLL GLYETVNEVY REFRKLTLTH VNKDHKRMFG KFGDLDEQEF PEISHRLEAF EVIKDSTPVD IQITFVEPYF YFEKNFNLRR GRPRGELHEQ HAFPYIKTRI TPIEVAIEDM INQEPPDAKM ATVNQGPLEV DPKLYRHHNK RCGEAVEKNK QQELKKNYNK RKIPELYKPI FHRSSFRKCE |
| 37 | DOCK8 | 3 | Q8NF503 | Entry version 160 (18 Sep. 2019) Sequence version 3 (21 Aug. 2007) | MTHLNSLDVQ DDLDVVFTPK EEGVELDPHV WLIVNRKNQG GSRKDFHKTL ECSEPAAQAG SGKGPVTACD RLENLLQQVS ARRTNRQAEL DAVEIRPVPE LVKLLTLKFE ALYDVKERKK SDQFKGFLRA ARSAVFSVTY IEKVLQQGEI KESDGGKSKE SFCQRLGKYR SSFFNVSTLE GRSSVGERRT ALSLEENGVG SSFFKQEGDR ADYKRSSSLQ RLEISTAPEI PVKPFPENRT TREVYVPHTV RLNFVNKLAS MCGEDASNAM EFLQEVYTAV EEVKIKLPAK FYHISCQQKQ SWLPILLNER ALEKLPPNYS NPPIKWAEGH VSSVHTQDNH LESQVTFPIR LEHELKLSII VLFLHLVLDK IAGQTANFSQ | LAQELGDFTD ECRTLQPSLP RDCVQTYIRE SPEICGFKKT PKQTFESETL PRHLNVLCDV FDLRSLQPDK AEDFEKQNEE FALYPSVDEE CPKEHLGNRI IEIEPLFASI ISENFHCDLN HTPSVAASSQ PSSDIYLVVK GDCAEPYTVI KIEKLKLQAE MPFAWAPISL REVTDVDSW LAQSRRLSER SNFKTSTLSV LSDEDLFKFL RRVKSIPGLL INCCLTPEML RPHKEILEFP YRNLLYVYPQ ARNITIKIQF PVIFGKSSGP TYHNKSPDFY LTVNHHLLFT GASVETLLGY LQTGSYCLPV MHSAEKVPLQ KGVFNIEVQA LEKFFTLCHS VLDQKISEMA CLNSSRLEPL LFQLSVQPMV FAFESVVAIA |
| | | | | | NSLHNSKDLS ASYVHYVFRL SYHTYGRTSA AAVSSKLLQA AGTHSAADEE DRNCSRMSYY PAAPRPASKK VVSTGMVRET LLVKSMAQHV RTRFSDRFMD SEIAALLVKP NISLAFFLYD FNLIRHYCSQ LISMRLEFLR LNLFFMNADT SQNSSSCSSF LTSEYRQQHF AALDAEGEGI IHSLLSSHDL VKIAALYLPL LCDFTVADTR QEGAGAINQN NLKTSGIVLS NADTTRNLMI QSLIRKWIAD DLLFICVLCF VSTQVLQKSR LRGEGARGEM FPGLNENLRW NEKLDKTKAE LATEAHLIIL SALDCKDSLL LNCDQSTTYL IAKFGDLLFE HQVLHHCSSS TLYLLMRFSF MQVTMSLASL HLRRSLRTIL MTPFPTQVEE DTVKMREFQE RIAKSYQASP AEKHTKKKCY AALVAEYLSM SVSFQNISSN TLSPDEDGVC VGLLEQAAEL NEVYKLVIPI TLTHSKLQRA RMFGTYFRVG EQEFVYKEPA LEAFYGQCFG TPVDKTKLDP EPYFDEYEMK NLRRFMYTTP LHEQYRRNTV KTRISVIQKE IEDMKKKTLQ DAKMLQMVLQ PLEVAQVFLA HHNKLRLCFK | KDQHGRNCLL PEVQRDVPKS GAPTALLDPR RVMSSSNPDL VKNIMSSKIA CSGSSDAPSS HFHEELALQM VFKYAWFFFE HNMDKRDSFR DITTIVNVVT QKENEQAEKM LLSLMDRGFV LSAKLSNLPT ILCSHEHYLN APTSPCPSIS QDQKIASMFD LTGLLFTELA SKVQRKAVSA DPRCVKPEVK VGIILDALPQ RYRTSGSDEE VALAIAGNNF SLPYKQYNML CFLWIMKNAD LPSTQLNRIL EYKGKQSSDK DVKARLEEAL MRRRAPGNDR KKEQTHWRQA LDQEALISGN DMQENIIQAS GGVLRVLVNS THCFATLRAL EEVEQCFDLC MDVTRSQACA GATSNFARVK VGRAPDFNEE AYSEEDTAMQ LLCNLNSILY DPEMLMDLMY DLRLTWLQNM TEAAMCLVHA LEDHSYLPVG VLEESVVSED AGQYFTESGL FSTGGLYETV LEAHREFRKL FDSIVNKDHK FFGSKFGDLD ITKLPEISHR AEFVEVIKDS NKAYIQITFV DRVTYFEKNF FTLEGRPRGE LTTMHAFPYI EFVLTPIEVA LAVAINQEPP GSVGATVNQG EIPADPKLYR EFIMRCGEAV |
| | | | | | EKNKRLITAD NYNKLKENLR YKPIFRVESQ RKCETQLSQG S | QREYQQELKK PMIERKIPEL KRDSFHRSSF |
| 38 | DOCK8 | 4 | Q8NF504 | Entry version 160 (18 Sep. 2019) Sequence version 3 (21 Aug. 2007) | MTHLNSLDVQ DDLDVVFTPK EEGVELDPHV WLIVNRKNQG GSRKDFHKTL ECSEPAAQAG SGKGPVTACD RLENLLQQVS ARRTNRQAEL DAVEIRPVPE LVKLLTLKFE ALYDVKERKK SDQFKGFLRA ARSAVFSVTY IEKVLQQGEI KESDGGKSKE SFCQRLGKYR SSFFNVSTLE GRSSVGERRT ALSLEENGVG SSFFKQEGDR ADYKRSSSLQ RLEISTAPEI PVKPFPENRT TREVYVPHTV RLNFVNKLAS MCGEDASNAM EFLQEVYTAV EEVKIKLPAK FYHISCQQKQ SWLPILLNER ALEKLPPNYS NPPIKWAEGH VSSVHTQDNH LESQVTFPIR LEHELKLSII VLFLHLVLDK IAGQTANFSQ NSLHNSKDLS ASYVHYVFRL GAPTALLDPR AAVSSKLLQA AGTHSAADEE DRNCSRMSYY PAAPRPASKK VVSTGMVRET LLVKSMAQHV RTRFSDRFMD SEIAALLVKP NISLAFFLYD FNLIRHYCSQ LISMRLEFLR LNLFFMNADT SQNSSSCSSF LTSEYRQQHF | LAQELGDFTD ECRTLQPSLP RDCVQTYIRE SPEICGFKKT PKQTFESETL PRHLNVLCDV FDLRSLQPDK AEDFEKQNEE FALYPSVDEE CPKEHLGNRI IEIEPLFASI ISENFHCDLN HTPSVAASSQ PSSDIYLVVK GDCAEPYTVI KIEKLKLQAE MPFAWAPISL REVTDVDSW LAQSRRLSER SNFKTSTLSV LSDEDLFKFL RRVKSIPGLL INCCLTPEML RPHKEILEFP YRNLLYVYPQ ARNITIKIQF PVIFGKSSGP TYHNKSPDFY LTVNHHLLFT GASVETLLGY LQTGSYCLPV MHSAEKVPLQ KGVFNIEVQA LEKFFTLCHS VLDQKISEMA CLNSSRLEPL LFQLSVQPMV FAFESVVAIA KDQHGRNCLL PEVQRDVPKS SYHTYGRTSA RVMSSSNPDL VKNIMSSKIA CSGSSDAPSS HFHEELALQM VFKYAWFFFE HNMDKRDSFR DITTIVNVVT QKENEQAEKM LLSLMDRGFV LSAKLSNLPT ILCSHEHYLN APTSPCPSIS QDQKIASMFD LTGLLFTELA |
| | | | | | AALDAEGEGI IHSLLSSHDL VKIAALYLPL LCDFTVADTR QEGAGAINQN NLKTSGIVLS NADTTRNLMI QSLIRKWIAD DLLFICVLCF VSTQVLQKSR LRGEGARGEM FPGLNENLRW NEKLDKTKAE LATEAHLIIL SALDCKDSLL LNCDQSTTYL IAKFGDLLFE HQVLHHCSSS TLYLLMRFSF MQVTMSLASL HLRRSLRTIL MTPFPTQVEE DTVKMREFQE RIAKSYQASP AEKHTKKKCY AALVAEYLSM SVSFQNISSN TLSPDEDGVC VGLLEQAAEL NEVYKLVIPI TLTHSKLQRA RMFGTYFRVG EQEFVYKEPA LEAFYGQCFG TPVDKTKLDP EPYFDEYEMK NLRRFMYTTP LHEQYRRNTV KTRISVIQKE IEDMKKKTLQ DAKMLQMVLQ PLEVAQVFLA HHNKLRLCFK EKNKRLITAD NYNKLKENLR YKPIFRVESQ RKCETQLSQG | SKVQRKAVSA DPRCVKPEVK VGIILDALPQ RYRTSGSDEE VALAIAGNNF SLPYKQYNML CFLWIMKNAD LPSTQLNRIL EYKGKQSSDK DVKARLEEAL MRRRAPGNDR KKEQTHWRQA LDQEALISGN DMQENIIQAS GGVLRVLVNS THCFATLRAL EEVEQCFDLC MDVTRSQACA GATSNFARVK VGRAPDFNEE AYSEEDTAMQ LLCNLNSILY DPEMLMDLMY DLRLTWLQNM TEAAMCLVHA LEDHSYLPVG VLEESVVSED AGQYFTESGL FSTGGLYETV LEAHREFRKL FDSIVNKDHK FFGSKFGDLD ITKLPEISHR AEFVEVIKDS NKAYIQITFV DRVTYFEKNF FTLEGRPRGE LTTMHAFPYI EFVLTPIEVA LAVAINQEPP GSVGATVNQG EIPADPKLYR EFIMRCGEAV QREYQQELKK PMIERKIPEL KRDSFHRSSF S |
| 39 | COMP | 1 | P49747 | Entry version 195 (18 Sep. 2019) Sequence version 2 (14 Oct. 2008) | MVPDTACVLL QGQSPLGSDL TNAALQDVRE FLKNTVMECD GLPSVRPLLH ACIQTESGAR NGSHCTDVNE RCINTSPGFR PTHQGVGLAF INECETGQHN RGSFQCGPCQ CQRRAQRFCP | LTLAALGASG GPQMLRELQE LLRQQVREIT ACGMQQSVRT CAPGFCFPGV CGPCPAGFTG CNAHPCFPRV CEACPPGYSG AKANKQVCTD CVPNSVCINT PGFVGDQASG DGSPSECHEH |
| | | | | | ADCVLERDGS GNGILCGRDT RCPERQCRKD EDVDRDGIGD VPNEKDNCPL EDKWGDACDN DTDQDGRGDA RNQADNCPRV DGIGDACDNC VDHDFVGDAC HQDSRDNCPT HDGQGDACDD RDNCRLVPNP GDVCQDDFDA PENAEVTLTD PEGDAQIDPN VQTMNSDPGL DFEGTFHVNT FGYQDSSSFY YWQANPFRAV KSSTGPGEQL ESQVRLLWKD SYRWFLQHRP EGPELVADSN RLGVFCFSQE CNDTIPEDYE | RSCVCAVGWA DLDGFPDEKL NCVTVPNSGQ ACDPDADGDG VRNPDQRNTD CRSQKNDDQK CDDDIDGDRI PNSDQKDSDG PQKSNPDQAD DSDQDQDGDG VPNSAQEDSD DDDNDGVPDS GQEDADRDGV DKVVDKIDVC FRAFQTVVLD WVVLNQGREI AVGYTAFNGV VTDDDYAGFI VVMWKQMEQT AEPGIQLKAV RNALWHTGDT PRNVGWKDKK QVGYIRVRFY VVLDTTMRGG NIIWANLRYR THQLRQA |
| 40 | COMP | 2 | P497472 | Entry version 195 (18 Sep. 2019) Sequence version 2 (14 Oct. 2008) | MVPDTACVLL QGQSPLGSDL TNAALQDVRE FLKNTVMECD GLPSVRPLLH ACIQTESGAR NGSHCTDVNE NSVCINTRGS VGDQASGCQR PSECHEHADC VCAVGWAGNG GFPDEKLRCP TVPNSGQEDV PDADGDGVPN PDQRNTDEDK QKNDDQKDTD DIDGDRIRNQ DQKDSDGDGI SNPDQADVDH QDQDGDGHQD SAQEDSDHDG NDGVPDSRDN DADRDGVGDV VDKIDVCPEN FQTVVLDPEG LNQGREIVQT YTAFNGVDFE DDYAGFIFGY WKQMEQTYWQ GIQLKAVKSS LWHTGDTESQ VGWKDKKSYR YIRVRFYEGP | LTLAALGASG GPQMLRELQE LLRQQVREIT ACGMQQSVRT CAPGFCFPGV CGPCPAGFTG CETGQHNCVP FQCGPCQPGF RAQRFCPDGS VLERDGSRSC ILCGRDTDLD ERQCRKDNCV DRDGIGDACD EKDNCPLVRN WGDACDNCRS QDGRGDACDD ADNCPRVPNS GDACDNCPQK DFVGDACDSD SRDNCPTVPN QGDACDDDDD CRLVPNPGQE CQDDFDADKV AEVTLTDFRA DAQIDPNWW MNSDPGLAVG GTFHVNTVTD QDSSSFYVVM ANPFRAVAEP TGPGEQLRNA VRLLWKDPRN WFLQHRPQVG ELVADSNVVL |
| | | | | | DTTMRGGRLG WANLRYRCND LRQA | VFCFSQENII TIPEDYETHQ |
| 41 | ATG7 | 1 | O95352 | Entry version 168 (18 Sep. 2019) Sequence version 1 (01 May 1999) | MAAATGDPGL ALDVGFWHEL DEAPKDIKGY ARLTLEFSAF CPAIGTLYNT KKLLLEQAAN ALENPVLLNK KYHFYYWFCY LIQGPVGLDQ ECAYDNLCQT IKYDENMVLV QGQRTKITIG PGWPLRNFLV QSVEVVCFRD HSIIFEVKLP AVGWEKNQKG ECMDPKRLAE CWRLVPTLDL LGAGTLGCNV HITFVDNAKI YEFEDCLGGG LQKIFPGVNA GHPVNFSSVT LEQLIESHDV RWLPAVIAAS GFDTFWMRH GDLCPNHPVA ANIPGYKLGC DSTRDRTLDQ VIAGALAVEL GYAIASSSDD LVPHQIRGFL LAFDKCTACS GFNFLAKVFN GLTLLHQETQ ETI | SKLQFAPFSS TQKKLNEYRL YYNGDSAGLP DMSAPTPARC NTLESFKTAD EIWESIKSGT FLLLTFADLK PALCLPESLP RFSLKQIEAL EGVTALPYFL SLLKHYSDFF VYDPCNLAQY LAAHRWSSSF RTMQGARDVA EMAFSPDCPK GMGPRMVNLS SSVDLNLKLM DKVVSVKCLL ARTLMGWGVR SYSNPVRQPL KPKALAAADR RGFNMSIPMP LEQARRDVEQ VFLLMDTRES KRKLVINAAL GLKKPKQQGA SADLLGSSLF YFCNDWAPG QCTVSRPGLA MVSVLQHPEG RMNEPPTSLG SRFDNVLPVS SKVLDQYERE SSHSFLEDLT AAEIWDMSDD |
| 42 | ATG7 | 2 | O953522 | Entry version 168 (18 Sep. 2019) Sequence version 1 (01 May 1999) | MAAATGDPGL ALDVGFWHEL DEAPKDIKGY ARLTLEFSAF CPAIGTLYNT KKLLLEQAAN ALENPVLLNK KYHFYYWFCY LIQGPVGLDQ ECAYDNLCQT IKYDENMVLV QGQRTKITIG PGWPLRNFLV QSVEVVCFRD HSIIFEVKLP AVGWEKNQKG ECMDPKRLAE CWRLVPTLDL LGAGTLGCNV | SKLQFAPFSS TQKKLNEYRL YYNGDSAGLP DMSAPTPARC NTLESFKTAD EIWESIKSGT FLLLTFADLK PALCLPESLP RFSLKQIEAL EGVTALPYFL SLLKHYSDFF VYDPCNLAQY LAAHRWSSSF RTMQGARDVA EMAFSPDCPK GMGPRMVNLS SSVDLNLKLM DKVVSVKCLL ARTLMGWGVR |
| | | | | | HITFVDNAKI YEFEDCLGGG LQKIFPGVNA GHPVNFSSVT LEQLIESHDV RWLPAVIAAS GFDTFWMRH GDLCPNHPVA ANIPGYKLGC DSTRDRTLDQ VIAGALAVEL GYAIASSSDD LVPHQVLDQY VFNSSHSFLE ETQAAEIWDM | SYSNPVRQPL KPKALAAADR RGFNMSIPMP LEQARRDVEQ VFLLMDTRES KRKLVINAAL GLKKPKQQGA SADLLGSSLF YFCNDWAPG QCTVSRPGLA MVSVLQHPEG RMNEPPTSLG EREGFNFLAK DLTGLTLLHQ SDDETI |
| 43 | ATG7 | 3 | O953523 | Entry version 168 (18 Sep. 2019) Sequence version 1 (01 May 1999) | MAAATGDPGL ALDVGFWHEL DEAPKDIKGY ARLTLEFSAF CPAIGTLYNT KKLLLEQAAN ALENPVLLNK LECAYDNLCQ LIKYDENMVL FQGQRTKITI YPGWPLRNFL FQSVEVVCFR AHSIIFEVKL KAVGWEKNQK SECMDPKRLA MCWRLVPTLD LLGAGTLGCN RHITFVDNAK LYEFEDCLGG RLQKIFPGVN TLEQARRDVE VVFLLMDTRE SRWLPAVIAA LGFDTFVVMR AGDLCPNHPV FANIPGYKLG GDSTRDRTLD AVIAGALAVE GGYAIASSSD GLVPHQIRGF SLAFDKCTAC ETI | SKLQFAPFSS TQKKLNEYRL YYNGDSAGLP DMSAPTPARC NTLESFKTAD EIWESIKSGT FLLLTFAIEA TEGVTALPYF VSLLKHYSDF GVYDPCNLAQ VLAAHRWSSS DRTMQGARDV PEMAFSPDCP GGMGPRMVNL ESSVDLNLKL LDKVVSVKCL VARTLMGWGV ISYSNPVRQP GKPKALAAAD ARGFNMSIPM PGHPVNFSSV QLEQLIESHD SKRKLVINAA HGLKKPKQQG ASADLLGSSL CYFCNDVVAP QQCTVSRPGL LMVSVLQHPE DRMNEPPTSL LSRFDNVLPV SSKIWDMSDD |
| 44 | SLC2A1 | 1 | P11166 | Entry version 230 (18 Sep. 2019) Sequence version 2 (03 Oct. 2006) | MEPSSKKLTG LGSLQFGYNT EEFYNQTWVH LTTLWSLSVA FSVGLFVNRF LLAFVSAVLM MLILGRFIIG PMYVGEVSPT QLGIVVGILI GNKDLWPLLL CIVLPFCPES | RLMLAVGGAV GVINAPQKVI RYGESILPTT IFSVGGMIGS GRRNSMLMMN GFSKLGKSFE VYCGLTTGFV ALRGALGTLH AQVFGLDSIM SIIFIPALLQ PRFLLINRNE |
| | | | | | ENRAKSVLKK LQEMKEESRQ ELFRSPAYRQ SQQLSGINAV AGVQQPVYAT TVVSLFVVER LAGMAGCAIL LPWMSYLSIV VGPGPIPWFI PAAIAVAGFS CFQYVEQLCG LVLFFIFTYF DEIASGFRQG ELFHPLGADS | LRGTADVTHD MMREKKVTIL PILIAVVLQL FYYSTSIFEK IGSGIVNTAF AGRRTLHLIG MTIALALLEQ AIFGFVAFFE VAELFSQGPR NWTSNFIVGM PYVFIIFTVL KVPETKGRTF GASQSDKTPE QV |
| 45 | GZMK | 1 | P49863 | Entry version 152 (18 Sep. 2019) Sequence version 1 (01 Oct. 1996) | MTKFSSFSLF VCFNMEIIGG MASIQYGGHH WVLTAAHCQY VLGAHSLSKN KFIPFSRVTS KLQTAAKLNK TSLRSGTKCK SLRPSDTLRE CNSQSYYNGD GDAKGQKDSC KGVFHAIVSG GIYTLLTKKY PHTN | FLIVGAYMTH KEVSPHSRPF VCGGVLIDPQ RFTKGQSPTV EASKQTLEIK DPQSNDIMLV HVKMLHIRSK VTGWGATDPD VTVTVLSRKL PFITKDMVCA KGDSGGPLIC GHECGVATKP QTWIKSNLVP |
| 46 | S100A9 | 1 | P06702 | Entry version 218 (18 Sep. 2019) Sequence version 1 (01 Jan. 1988) | MTCKMSQLER QYSVKLGHPD VRKDLQNFLK HIMEDLDTNA MLMARLTWAS PGHHHKPGLG | NIETIINTFH TLNQGEFKEL KENKNEKVIE DKQLSFEEFI HEKMHEGDEG EGTP |
| 47 | S100A8 | 1 | P05109 | Entry version 209 (18 Sep. 2019) Sequence version 1 (01 Jan. 1988) | MLTELEKALN LIKGNFHAVY ECPQYIRKKG NTDGAVNFQE AAHKKSHEES | SIIDVYHKYS RDDLKKLLET ADVWFKELDI FLILVIKMGV HKE |
| 48 | ATM | 1 | Q13315 | Entry version 236 (18 Sep. 2019) Sequence version 4 (22 Jan. 2014) | MSLVLNDLLI TERKKEVEKF KHLDRHSDSK FRFLQKYIQK NVSASTQASR VKYFIKCANR LNYIMDTVKD CSNILLKDIL QQQWLELFSV DVHRVLVARI QTDGLNSKFL RQEKSSSGLN KTLAVNFRIR TLLYIWTQHR ELFQLQIYIH GAYESTKWRS NEISHIGSRG VKENLIELMA TRSLEISQSY | CCRQLEHDRA KRLIRDPETI QGKYLNWDAV ETECLRIAKP QKKMQEISSL RAPRLKCQEL SSNGAIYGAD SVRKYWCEIS YFRLYLKPSQ IHAVTKGCCS DFFSKAIQCA HILAALTIFL VCELGDEILP LNDSLKEVII HPKGAKTQEK ILYNLYDLLV KYSSGFRNIA DICHQVFNED TTTQRESSDY |
| | | | | | SVPCKRKKIE QKSQNDFDLV SKYPASLPNC QLLPQQRHGE EVALCQDKRS LKLWNKIWCI QAENFGLLGA REFWKLFTGS CLTLALTTSI QNMCEVNRSF LFYQLEGDLE SNFPHLVLEK KAAMNFFQSV EELSFSEVEE DFLTIVRECG SVHQNLKESL LLNNYSSEIT LLVGVLGCYC YKSELFQKAK TLFKNKTNEE QLCTRCLSNC GFFLRLLTSK SLASFIKKPF DTNGNLMEVE YPDSSVSDAN AINPLAEEYL LKFLCLCVTT ADIRRKLLML SLHLHMYLML LPMEDVLELL RRDQDVCKTI LGQSNMDSEN VIGAFWHLTK ALVNCLKTLL LNVMGKDFPV NHHQVRMLAA KGDSSRLLKA ENAYLKAQEG PETLDEIYNR VLSCSPICEK KENGLEPHLV FGYRRLEDFM WLNLQDTEYN YTNIEDFYRS IRSHFDEVKS SLLTDCFPKI EGTRDSGMAQ MLKSENLLGK PEIVVELLMT QSTDLCDFSG FPSHVIKATF LKSILEILSK AICEQAAETN IYHLFVSLLL WAFVLRDVIY SCIMDVSLRS VCQTAVTYCK VGTLIPLVYE LLKYLVIDNK LLDPFPDHVV | LGWEVIKDHL PWLQIATQLI ELSPLLMILS RTPYVLRCLT NLESSQKSDL TFRGISSEQI IIQGSLVEVD ACRPSCPAVC VPGTVKMGIE SLKESIMKWL NSTEVPPILH ILVSLTMKNC PECEHHQKDK LFLQTTFDKM IEKHQSSIGF DRCLLGLSEQ NSETLVRCSR YMGVIAEEEA SLMQCAGESI FRIGSLRNMM TKKSPNKIAS LMNDIADICK DRGEVESMED DQSSMNLFND EPGESQSTIG SKQDLLFLDM AQTNTVSFRA IDSSTLEPTK LKELPGEEYP KPLSNVCSLY LNHVLHVVKN TRDAQGQFLT ERKYIFSVRM EADPYSKWAI NEVFTQFLAD ESINRLFQDT LPLKLQQTAF MREMSHSAEN KSVLLTLIAV QALFALCKSV KKVLEKVSET ASHLDYLVLE LSSFPFILLN CYKVLIPHLV IANQIQEDWK LVNILPYFAY QRETATKVYD QIDHLFISNL LHEPANSSAS DLDPAPNPPH AYISNCHKTK SPDSYQKILL NVYKKHRILK KDIKSGLGGA TLIHYINQRP FSLCCDLLSQ DALENHLHVI QVEVQKQVLD DNENLYITIK FKDLRITQQK |
| | | | | | IKYSRGPFSL SVYDALPLTR LELHKDQMVD DGIMVKLVVN HTGEKEVLEA IDFSTIAIQH KLFEDKELQW TLVEDCVKVR LATKTGHSFW LAYLQPFRTS DKENPFEGLD NHDIWIKTLT CEILQLLKPM VLPYLIHDIL LLSTHVQGFF SRSTTPANLD LDKKSQRTML RPSSGTIFND VAKVAQSCAA YADKKSMDDQ SQSTTISSLS LQDLLLEIYR CGGGKMLQPI MWGKALVTYD QAGIIQALQN LKGLDYENKD QAAWRNMQWD GTSYHESLYN STFYESLKYA RSLESVYSLY ELESIGELFS VYIKWQKHSQ EPIMALRTVI NSQRECIKDI LARTFKNTQL YNSVSCGVSE AKKEQSLALS ASCAANNPSL CGNWLAETCL LEKAVEVAGN NGKMKAFLSL IENYMKSSEF KEEVGLLREH VQRELELDEL RFLCKAVENY DMWVFRLCSL NGMMKRDGMK YQLAARMGTK LNNLISRISM LALANANRDE SRITKNVPKQ AANRIICTIR EALCDAYIIL QRKGINIPAD DVVVPTMEIK VTIQSFKAEF IIDCVGSDGK DLRQDAVMQQ RNTETRKRKL SQRSGVLEWC | LEEINHFLSV LEGLKDLRRQ IMRASQDNPQ LLQLSKMAIN VGSCLGEVGP SKDASYTKAL TFIMLTYLNN SAAVTCLKNI EIYKMTTDPM RKKFLEVPRF DINLWIPLSE CAFLDSGGTK CEVKTDFCQT LQDTNESWRN TSCLRHFSQT SESEHFFRCC AVVDYMRRQK AFWLDLNYLE HFTALLYAEI EKRSLAFEEG EKSKEETGIS SIGEPDSLYG TRLRTYEHEA LETAIPSSTR LGLCHILSVY WCPELEELHY HCTSVSKEVE ALQSLRDREF RVKEVEEMCK PTLSRLQAIG RSVTHRQLSE LLKDSDFSFQ LEILMEKEMD LTKHLVELSI PERAIFQIKQ WQLEEAQVFW ILKQMIKKLD KLTYTECLRV ENPAVIMQTY YDGESSDELR ARFSDTQYQR ENKQALLKRA KIQTNRYTVK ALRALKEDRK INCLLSGEEH WLENSGVSEV IPTYKFLPLM MMGGLGFHEV DHPHHTLFII FLTKPEVARR SSQLDEDRTE SRRPQMVRSV ANLDATQWKT QPITKLKNLE VDHTGEYGNL RLAGGVNLPK ERRQLVKGRD VFQMCNTLLQ TICTYKWPL TGTVPIGEFL |
| | | | | | VNNEDGAHKR CQKKMMEVQK MDVCQNFQPV DPAIWFEKRL IVGYILGLGD QSAELVHIDL PTPETVPFRL TGVEGVFRRC SQETLLTIVE TMNPLKALYL HPTLNADDQE SFNKVAERVL EEGTVLSVGG DPKNLSRLFP | YRPNDFSAFQ KSFEEKYEVF FRYFCMEKFL AYTRSVATSS RHVQNILINE GVAFEQGKIL TRDIVDGMGI CEKTMEVMRN VLLYDPLFDW QQRPEDETEL CKRNLSDIDQ MRLQEKLKGV QVNLLIQQAI GWKAWV |
| 49 | IKBKB | 1 | O14920 | Entry version 217 (18 Sep. 2019) Sequence version 1 (01 Jan. 1998) | MSWSPSLTTQ LGTGGFGNVI IAIKQCRQEL EIQIMRRLTH EGMQNLAPND GGDLRKYLNQ AILTLLSDIA IIHRDLKPEN IHKIIDLGYA SFVGTLQYLA VTVDYWSFGT PFLPNWQPVQ VDIWSEDLN YPNNLNSVLA LMWHPRQRGT KALDDILNLK TIHTYPVTED QQDTGIPEED LIPDKPATQC TLDMDLVFLF ISPRPQPESV LAFFQLRKVW KEDCNRLQQG NNSCLSKMKN AKLDFFKTSI TEFGITSDKL VELCGRENEV QTDIVDLQRS DDLEEQAREL QRTEGDSQEM FEKKVRVIYT KALELLPKVE KTVVRLQEKR ACSKVRGPVS LSQPGQLMSQ PAKKSEELVA NAIQDTVREQ WLQTEEEEHS | TCGAWEMKER RWHNQETGEQ SPRNRERWCL PNVVAARDVP LPLLAMEYCQ FENCCGLREG SALRYLHENR IVLQQGEQRL KELDQGSLCT PELLEQQKYT LAFECITGFR WHSKVRQKSE GTVKFSSSLP ERLEKWLQLM DPTYGPNGCF LVHILNMVTG ESLQSLKARI QELLQEAGLA ISDGKLNEGH DNSKITYETQ SCILQEPKRN GQVWHSIQTL QRAAMMNLLR SMASMSQQLK QIDLEKYSEQ LLAWREMEQA KLLVERMMAL PMGRKQGGTL YRRLREKPRD VRLLLQAIQS QLSKTWCKQ EVVSLMNEDE QKELWNLLKI GSPDSMNASR PSTASNSLPE EAHNLCTLLE DQSFTALDWS CLEQAS |
| 50 | IKBKB | 2 | O149202 | Entry version 217 (18 Sep. 2019) Sequence version 1 (01 Jan. 1998) | MFSGGCHSPG PGSPPPAPRP IKQCRQELSP QIMRRLTHPN MQNLAPNDLP DLRKYLNQFE LTLLSDIASA HRDLKPENIV | FGRPSPAFPA CRQETGEQIA RNRERWCLEI VVAARDVPEG LLAMEYCQGG NCCGLREGAI LRYLHENRII LQQGEQRLIH |
| | | | | | KIIDLGYAKE VGTLQYLAPE VDYWSFGTLA LPNWQPVQWH IVVSEDLNGT NNLNSVLAER WHPRQRGTDP LDDILNLKLV HTYPVTEDES DTGIPEEDQE PDKPATQCIS DMDLVFLFDN PRPQPESVSC FFQLRKVWGQ DCNRLQQGQR SCLSKMKNSM LDFFKTSIQI FGITSDKLLL LCGRENEVKL DIVDLQRSPM LEEQARELYR TEGDSQEMVR KKVRVIYTQL LELLPKVEEV VVRLQEKRQK SKVRGPVSGS QPGQLMSQPS KKSEELVAEA IQDTVREQDQ QTEEEEHSCL | LDQGSLCTSF LLEQQKYTVT FECITGFRPF SKVRQKSEVD VKFSSSLPYP LEKWLQLMLM TYGPNGCFKA HILNMVTGTI LQSLKARIQQ LLQEAGLALI DGKLNEGHTL SKITYETQIS ILQEPKRNLA VWHSIQTLKE AAMMNLLRNN ASMSQQLKAK DLEKYSEQTE AWREMEQAVE LVERMMALQT GRKQGGTLDD RLREKPRDQR LLLQAIQSFE SKTVVCKQKA VSLMNEDEKT ELWNLLKIAC PDSMNASRLS TASNSLPEPA HNLCTLLENA SFTALDWSWL EQAS |
| 51 | IKBKB | 3 | O149203 | Entry version 217 (18 Sep. 2019) Sequence version 1 (01 Jan. 1998) | MSWSPSLTTQ LGTGGFGNVI SPRNRERWCL EIQIMRRLTH EGMQNLAPND GGDLRKYLNQ AILTLLSDIA IIHRDLKPEN IHKIIDLGYA SFVGTLQYLA VTVDYWSFGT PFLPNWQPVQ HSCNPSTLGG | TCGAWEMKER RWHNQETGEQ IAIKQCRQEL PNVVAARDVP LPLLAMEYCQ FENCCGLREG SALRYLHENR IVLQQGEQRL KELDQGSLCT PELLEQQKYT LAFECITGFR CVRMWPGTVA RGRWIS |
| 52 | IKBKB | 4 | O149204 | Entry version 217 (18 Sep. 2019) Sequence version 1 (01 Jan. 1998) | MSSDGTIRLT PEGMQNLAPN QGGDLRKYLN GAILTLLSDI RIIHRDLKPE LIHKIIDLGY TSFVGTLQYL TVTVDYWSFG RPFLPNWQPV EVDIVVSEDL PYPNNLNSVL MLMWHPRQRG FKALDDILNL GTIHTYPVTE IQQDTGIPEE ALIPDKPATQ | HPNVVAARDV DLPLLAMEYC QFENCCGLRE ASALRYLHEN NIVLQQGEQR AKELDQGSLC APELLEQQKY TLAFECITGF QWHSKVRQKS NGTVKFSSSL AERLEKWLQL TDPTYGPNGC KLVHILNMVT DESLQSLKAR DQELLQEAGL CISDGKLNEG |
| | | | | | HTLDMDLVFL QISPRPQPES NLAFFQLRKV LKEDCNRLQQ RNNSCLSKMK KAKLDFFKTS QTEFGITSDK AVELCGRENE LQTDIVDLQR LDDLEEQARE DQRTEGDSQE SFEKKVRVIY QKALELLPKV EKTVVRLQEK IACSKVRGPV RLSQPGQLMS EPAKKSEELV ENAIQDTVRE SWLQTEEEEH | FDNSKITYET VSCILQEPKR WGQVWHSIQT GQRAAMMNLL NSMASMSQQL IQIDLEKYSE LLLAWREMEQ VKLLVERMMA SPMGRKQGGT LYRRLREKPR MVRLLLQAIQ TQLSKTVVCK EEWSLMNED RQKELWNLLK SGSPDSMNAS QPSTASNSLP AEAHNLCTLL QDQSFTALDW SCLEQAS |
| 53 | BCAP31 | 1 | P51572 | Entry version 186 (18 Sep. 2019) Sequence version 3 (23 Jan. 2007) | MSLQWTAVAT LLCIPFISPK VELLVSYGNT LLVIDAVREI NLQNNPGAME RNLYIAGFSL TLISQQATLL ESASEAAKKY AAVDGGKLDV NRSLKADLQK KLEKAENQVL KEYDRLLEEH MDKKEE | FLYAEVFVVL RWQKIFKSRL FFVVLIVILV RKYDDVTEKV HFHMKLFRAQ LLSFLLRRLV ASNEAFKKQA MEENDQLKKG GNAEVKLEEE LKDELASTKQ AMRKQSEGLT AKLQAAVDGP |
| 54 | BCAP31 | 2 | P515722 | Entry version 186 (18 Sep. 2019) Sequence version 3 (23 Jan. 2007) | MGAEASSSWC SVKRASEISG ALDVLTHVLE GKPSSNRMSL AEVFVVLLLC KIFKSRLVEL VLIVILVLLV DDVTEKVNLQ MKLFRAQRNL FLLRRLVTLI EAFKKQAESA NDQLKKGAAV EVKLEEENRS ELASTKQKLE KQSEGLTKEY QAAVDGPMDK | PGTALPEERL FLGQGSSGEA GAGNKLTSSC QWTAVATFLY IPFISPKRWQ LVSYGNTFFV IDAVREIRKY NNPGAMEHFH YIAGFSLLLS SQQATLLASN SEAAKKYMEE DGGKLDVGNA LKADLQKLKD KAENQVLAMR DRLLEEHAKL KEE |
| 55 | TAPBP | 1 | O15533 | Entry version 190 (18 Sep. 2019) Sequence version 1 (01 Jan. 1998) | MKSLSLLLAV GPAVIECWFV RPGALLLRQG DPELYLSVHD RYPRGAPAPH ASAKWASGLT GAWLMVSISS PQPEPQQEPV VLTHTPAPRV SFAYMPPTSE PFGLEWRRQH TPGLNGQMPA | ALGLATAVSA EDASGKGLAK PGEPPPRPDL PAGALQAAFR CEMSRFVPLP PAQNCPRALD PVLSLSSLLR LITMATVVLT RLGQDALLDL AASSLAPGPP LGKGHLLLAA AQEGAVAFAA |
| | | | | | WDDDEPWGPW VQPFQEGTYL QVTLELAVYK LARAAPGEAP YPSGGLEVEW QKAEGQRWLS SLSGHLQPPP ACRIHHPSLP EVAGLSGPSL FLLLGLFKAL KDSKKKAE | TGNGTFWLPR ATIHLPYLQG PPKVSLMPAT PELLCLVSHF ELRGGPGGRS ALRHHSDGSV VTTEQHGARY ASGRSAEVTL EDSVGLFLSA GWAAVYLSTC |
| 56 | TAPBP | 2 | O155332 | Entry version 190 (18 Sep. 2019) Sequence version 1 (01 Jan. 1998) | MKSLSLLLAV GPAVIECWFV RPGALLLRQG DPELYLSVHD RYPRGAPAPH ASAKWASGLT GAWLMVSISS PQPEPQQEPV VLTHTPAPRV SFAYMPPTSE PFGLEWRRQH TPGLNGQMPA WDDDEPWGPW VQPFQEGTYL QVTLELAVYK LARAAPGEAP YPSGGLEVEW QKAEGQRWLS SLSGHLQPPP ACRIHHPSLP EVAGKSWELC | ALGLATAVSA EDASGKGLAK PGEPPPRPDL PAGALQAAFR CEMSRFVPLP PAQNCPRALD PVLSLSSLLR LITMATVVLT RLGQDALLDL AASSLAPGPP LGKGHLLLAA AQEGAVAFAA TGNGTFWLPR ATIHLPYLQG PPKVSLMPAT PELLCLVSHF ELRGGPGGRS ALRHHSDGSV VTTEQHGARY ASGRSAEVTL GI |
| 58 | TAPBP | 4 | O15533 | Entry version | MKSLSLLLAV | ALGLATAVSA |
| | | | 4 | 190 (18 Sep. 2019) Sequence version 1 (01 Jan. 1998) | GPAVIECWFV RPGALLLRQG DPELYLSVHV PRVRLGQDAL TSEAASSLAP RQHLGKGHLL MPAAQEGAVA GPWTGNGTFW TYLATIHLPY VYKPPKVSLM EAPPELLCLV VEWELRGGPG WLSALRHHSD PPPVTTEQHG SLPASGRSAE PSLEDSVGLF KALGWAAVYL E | EDASGKGLAK PGEPPPRPDL VLTVLTHTPA LDLSFAYMPP GPPPFGLEWR LAATPGLNGQ FAAWDDDEPW LPRVQPFQEG LQGQVTLELA PATLARAAPG SHFYPSGGLE GRSQKAEGQR GSVSLSGHLQ ARYACRIHHP VTLEVAGLSG LSAFLLLGLF STCKDSKKKA |
| 59 | PPP3CB | 1 | P16298 | Entry version 166 (18 Sep. 2019) Sequence version 2 (01 Feb. 2005) | MAAPEPARAA PGADRVVKAV EEVFDLDGIP KEGRVDEEIA LRREKTMIEV HGQFFDLMKL RYLFLGDYVD YLWVLKILYP ECRHLTEYFT ERVYEACMEA NQQFLCVHGG IRRLDRFKEP WSDPSEDFGN TVRGCSYFYN NNLLSIIRAH RKSQTTGFPS LDVYNNKAAV RQFNCSPHPY WSLPFVGEKV CSDDELMTEG RKEIIRNKIR VLREESESVL LPSGVLAGGR IEAEKAIRGF EAKGLDRINE QDGFNSLNTA HTAQ | PPPPPPPPPP PFPPTHRLTS RVDVLKNHLV LRIINEGAAI EAPITVCGDI FEVGGSPANT RGYFSIECVL STLFLLRGNH FKQECKIKYS FDSLPLAALL LSPEIHTLDD PAFGPMCDLL EKSQEHFSHN YPAVCEFLQN EAQDAGYRMY LITIFSAPNY LKYENNVMNI WLPNFMDVFT TEMLVNVLSI EDQFDGSAAA AIGKMARVFS TLKGLTPTGM QTLQSATVEA SPPHRICSFE RMPPRKDAVQ HATENHGTGN |
| 60 | PPP3CB | 2 | P162982 | Entry version 166 (18 Sep. 2019) Sequence version 2 (01 Feb. 2005) | MAAPEPARAA PFPPTHRLTS EEVFDLDGIP KEGRVDEEIA LRREKTMIEV HGQFFDLMKL RYLFLGDYVD GTEDISINPH WVLKILYPST RHLTEYFTFK VYEACMEAFD QFLCVHGGLS RLDRFKEPPA DPSEDFGNEK | PPPPPPPPPP PGADRVVKAV RVDVLKNHLV LRIINEGAAI EAPITVCGDI FEVGGSPANT RGYFSIEHVL NNINECVLYL LFLLRGNHEC QECKIKYSER SLPLAALLNQ PEIHTLDDIR FGPMCDLLWS SQEHFSHNTV |
| | | | | | RGCSYFYNYP LLSIIRAHEA SQTTGFPSLI VYNNKAAVLK FNCSPHPYWL LPFVGEKVTE DDELMTEGED EIIRNKIRAI REESESVLTL SGVLAGGRQT AVPQMDWGTP CREFLLFFSS | AVCEFLQNNN QDAGYRMYRK TIFSAPNYLD YENNVMNIRQ PNFMDVFTWS MLVNVLSICS QFDGSAAARK GKMARVFSVL KGLTPTGMLP LQSGNDVMQL HSFANNSHNA CLSS |
| 61 | PPP3CB | 3 | P162983 | Entry version 166 (18 Sep. 2019) Sequence version 2 (01 Feb. 2005) | MAAPEPARAA PGADRVVKAV EEVFDLDGIP KEGRVDEEIA LRREKTMIEV HGQFFDLMKL RYLFLGDYVD YLWVLKILYP ECRHLTEYFT ERVYEACMEA NQQFLCVHGG IRRLDRFKEP WSDPSEDFGN TVRGCSYFYN NNLLSIIRAH RKSQTTGFPS LDVYNNKAAV RQFNCSPHPY WSLPFVGEKV CSDDELMTEG ARKEIIRNKI SVLREESESV MLPSGVLAGG FSPPHRICSF ERMPPRKDAV AHATENHGTG | PPPPPPPPPP PFPPTHRLTS RVDVLKNHLV LRIINEGAAI EAPITVCGDI FEVGGSPANT RGYFSIECVL STLFLLRGNH FKQECKIKYS FDSLPLAALL LSPEIHTLDD PAFGPMCDLL EKSQEHFSHN YPAVCEFLQN EAQDAGYRMY LITIFSAPNY LKYENNVMNI WLPNFMDVFT TEMLVNVLSI EDQFDVGSAA RAIGKMARVF LTLKGLTPTG RQTLQSAIRG EEAKGLDRIN QQDGFNSLNT NHTAQ |
| 62 | PPP3CB | 4 | P162984 | Entry version 166 (18 Sep. 2019) Sequence version 2 (01 Feb. 2005) | MAAPEPARAA PGADRVVKAV EEVFDLDGIP KEGRVDEEIA LRREKTMIEV HGQFFDLMKL RYLFLGDYVD YLWVLKILYP ECRHLTEYFT ERVYEACMEA NQQFLCVHGG IRRLDRFKEP WSDPSEDFGN TVRGCSYFYN NNLLSIIRAH RKSQTTGFPS LDVYNNKAAV RQFNCSPHPY WSLPFVGEKV CSDDELMTEG ARKEIIRNKI SVLREESESV | PPPPPPPPPP PFPPTHRLTS RVDVLKNHLV LRIINEGAAI EAPITVCGDI FEVGGSPANT RGYFSIECVL STLFLLRGNH FKQECKIKYS FDSLPLAALL LSPEIHTLDD PAFGPMCDLL EKSQEHFSHN YPAVCEFLQN EAQDAGYRMY LITIFSAPNY LKYENNVMNI WLPNFMDVFT TEMLVNVLSI EDQFDVGSAA RAIGKMARVF LTLKGLTPTG |
| | | | | | MLPSGVLAGG AIEAEKAIRG EEAKGLDRIN QQDGFNSLNT NHTAQ | RQTLQSATVE FSPPHRICSF ERMPPRKDAV AHATENHGTG |
| 63 | ANXA1 | 1 | P04083 | Entry version 244 (18 Sep. 2019) Sequence version 2 (23 Jan. 2007) | MAMVSEFLKQ YVQTVKSSKG TFNPSSDVAA DEATIIDILT KAAYLQETGK TCHLEEVVLA DELRAAMKGL LASRTNKEIR KRDLAKDITS LSLAKGDRSE SDARALYEAG FNTILTTRSY TKYSKHDMNK EKCLTAIVKC KLHQAMKGVG VSRSEIDMND ISLCQAILDE ALCGGN | AWFIENEEQE GPGSAVSPYP LHKAIMVKGV KRNNAQRQQI PLDETLKKAL LLKTPAQFDA GTDEDTLIEI DINRVYREEL DTSGDFRNAL DFGVNEDLAD ERRKGTDVNV PQLRRVFQKY VLDLELKGDI ATSKPAFFAE TRHKALIRIM IKAFYQKMYG TKGDYEKILV |
| 64 | PERM | 1 | P05164 | Entry version 221 (18 Sep. 2019) Sequence version 1 (13 Aug. 1987) | MGVPFFSSLR GGLTAEMKLL ATPQPSEGAA LVLSSMEEAK RESIKQRLRS YFKQPVAATR VALDLLERKL TDVLTPAQLN QDVGVTCPEQ NNRRSPTLGA AEYEDGFSLP GFPVALARAV QLTPDQERSL HDLDFTPEPA CETSCVQQPP PRIKNQADCI GSNITIRNQI MVYGSEEPLA GLLAVNQRFQ NLHDDPCLLT AGDTRSSEMP REHNRLATEL RLYQEARKIV DYLPLVLGPT SYNDSVDPRI GHTLIQPFMF RLDNRYQPME GGIDPILRGL NQIAVDEIRE LDLPALNMQR AWRRFCGLPQ LRNLKLARKL DIWMGGVSEP LACIIGTQFR ENEGVFSMQQ RIICDNTGIT | CMVDLGPCWA LALAGLLAIL PAVLGEVDTS QLVDKAYKER GSASPMELLS TAVRAADYLH RSLWRRPFNV VLSKSSGCAY DKYRTITGMC SNRAFVRWLP YGWTPGVKRN SNEIVRFPTD MFMQWGQLLD ARASFVTGVN CFPLKIPPND PFFRSCPACP NALTSFVDAS RNLRNMSNQL DNGRALLPFD NRSARIPCFL ELTSMHTLLL KSLNPRWDGE GAMVQIITYR AMRKYLPTYR ANVFTNAFRY PNPRVPLSRV FFASWRWLE MATPAKLNRQ RLFEQVMRIG SRDHGLPGYN PETVGQLGTV MEQYGTPNNI LKRKGRVGPL KLRDGDRFWW RQALAQISLP TVSKNNIFMS |
| | | | | | NSYPRDFVNC WREAS | STLPALNLAS |
| 65 | PERM | 2 | P051642 | Entry version 221 (18 Sep. 2019) Sequence version 1 (13 Aug. 1987) | MELLSYFKQP ADYLHVALDL RPFNVTDVLT SGCAYQDVGV ITGMCNNRRS VRWLPAEYED GVKRNGFPVA RFPTDQLTPD GQLLDHDLDF VTGVNCETSC IPPNDPRIKN CPACPGSNIT FVDASMVYGS MSNQLGLLAV LLPFDNLHDD IPCFLAGDTR HTLLLREHNR RWDGERLYQE IITYRDYLPL LPTYRSYNDS NAFRYGHTLI YQPMEPNPRV RWLEGGIDP KLNRQNQIAV VMRIGLDLPA LPGYNAWRRF QLGTVLRNLK TPNNIDIWMG RVGPLLACII DRFWWENEGV QISLPRIICD NIFMSNSYPR LNLASWREAS | VAATRTAVRA LERKLRSLWR PAQLNVLSKS TCPEQDKYRT PTLGASNRAF GFSLPYGWTP LARAVSNEIV QERSLMFMQW TPEPAARASF VQQPPCFPLK QADCIPFFRS IRNQINALTS EEPLARNLRN NQRFQDNGRA PCLLTNRSAR SSEMPELTSM LATELKSLNP ARKIVGAMVQ VLGPTAMRKY VDPRIANVFT QPFMFRLDNR PLSRVFFASW ILRGLMATPA DEIRERLFEQ LNMQRSRDHG CGLPQPETVG LARKLMEQYG GVSEPLKRKG GTQFRKLRDG FSMQQRQALA NTGITTVSKN DFVNCSTLPA |
| 66 | PERM | 3 | P051643 | Entry version 221 (18 Sep. 2019) Sequence version 1 (13 Aug. 1987) | MGVPFFSSLR GGLTAEMKLL ATPQPSEGAA LVLSSMEEAK RESIKQRLRS YFKQPVAATR VALDLLERKL TDVLTPAQLN QDVGVTCPEQ NNRCGWLGVA TPQASRCQRP GASNRAFVRW LPYGWTPGVK AVSNEIVRFP SLMFMQWGQL PAARASFVTG PPCFPLKIPP CIPFFRSCPA QINALTSFVD LARNLRNMSN FQDNGRALLP LTNRSARIPC MPELTSMHTL ELKSLNPRWD | CMVDLGPCWA LALAGLLAIL PAVLGEVDTS QLVDKAYKER GSASPMELLS TAVRAADYLH RSLWRRPFNV VLSKSSGCAY DKYRTITGMC AGTGLREASR VLPCRRSPTL LPAEYEDGFS RNGFPVALAR TDQLTPDQER LDHDLDFTPE VNCETSCVQQ NDPRIKNQAD CPGSNITIRN ASMVYGSEEP QLGLLAVNQR FDNLHDDPCL FLAGDTRSSE LLREHNRLAT GERLYQEARK |
| | | | | | IVGAMVQIIT PTAMRKYLPT RIANVFTNAF MFRLDNRYQP RVFFASWRVV GLMATPAKLN RERLFEQVMR QRSRDHGLPG PQPETVGQLG KLMEQYGTPN EPLKRKGRVG FRKLRDGDRF QQRQALAQIS ITTVSKNNIF NCSTLPALNL | YRDYLPLVLG YRSYNDSVDP RYGHTLIQPF MEPNPRVPLS LEGGIDPILR RQNQIAVDEI IGLDLPALNM YNAWRRFCGL TVLRNLKLAR NIDIWMGGVS PLLACIIGTQ WWENEGVFSM LPRIICDNTG MSNSYPRDFV ASWREAS |
| 67 | PLEC | 1 | Q15149 | Entry version 224 (18 Sep. 2019) Sequence version 3 (14 Oct. 2008) | MVAGMLMPRD REGVMVAKKD PGVTNLQVMR VRETFAWCHF HLRQYLHLPP RRPVAMVMPA GPLGSPPKRG RRKELEEVSP RTLARPGPEP QKKTFTKWVN SDLYEDLRDG SGDSLPREKG QIALDYLRHR DIADGNPKLT FQISDIQVSG LLLWSQRMVE TSSWRDGRLF LIDMNKVYRQ SVAERDLGVT PQPDEKSIIT RVPDVQDGVR YRELVLLLLQ ERRFPSSFEE FKEMELPAKE QSLEGAVQAG LDVEKEWGKL LRSEFERLEC EAGLCEEQLN RLLAAGKVPQ KADSMIRLLF HPQGEQMYRR IRTEYNLRLK AQVTLQSVQR YLQDLLAWVE WGVDLPSVEA SIEEFRAKIE PATRGAYRDC LLNSSKARLR AATKELMWLN WSDRNTNMTA ELELKEKKIK REDHPARPTV WSWMLQLCCC YFQFFSDVRE ALRRKYSCDR | QLRAIYEVLF RRPRSLHPHV AMASLRARGL YWYLTNEGIA EIVPASLQRV RRTPHVQAVQ PLPTEEQRVY ETPWPATTQ APATDERDRV KHLIKAQRHI HNLISLLEVL RMRFHKLQNV QVKLVNIRND LGLIWTIILH QSEDMTAKEK GYQGLRCDNF NAIIHRHKPL TNLENLDQAF RLLDPEDVDV YVSSLYDAMP ANELQLRWQE WMRHHTAAFE IEILWSQFLK ADKNRSKGIY QLKVPPGYHP HVAILEREKQ LQRIVTKLQM QADALLQSDV RAGEVERDLD NDVQTLKDGR VYRLHERLVA AGVAAPATQV RPELEDSTLR ENQHRVDGAE QLGSHRGLHQ RARSDEGQLS LGRLDLQYAK SLESLHSFVA EKEEEEVGFD KKESYSALMR ELQNAGDRLL ESFQAALQTQ IEAHLKENAA AEGQLQKLQE SATVTRLEDL |
| | | | | | LQDAQDEKEQ LAKRAKAVVQ RGRLPLLAVC KGDECQLVGP SSGSEAAVPS EAQEAVTRLE HQLHVDMKSL QLIRSWSLAT QALHSLELHY GGFGPEDRLM HYQQLLQSLE RCISELKDIR VHRLRLPLDK AEQQKAQAEV SAEAEKVLAL RSELELTLGK YLEKLKTISL VLRAHEEQLK ELEATKASLK PTFDALRDEL QQRHGERDVE LLERWQAVLA QLGRQLRYYR QDARRRQEQI VREQLRQEQA KVEECQRFAK LQLVTYKAQL KVQSGSESVI SELTTLTSQY MEEEERLAEQ EVEAALEKQR AQAEREAKEL REEAAVDAQQ QLRQSSEAEI IRVVRLQLEA TERQRGGAEG EAEAQKRQAQ EVELASRVKA ALQALEELRL QAEEAERRLR QVALETAQRS SFAEKTAQLE AQLREEAERR REEAERELER LRLQAEEVAQ KQKEEAEREA VRQRELAEQE TAQQRLAAEQ QGEQQRQLLE AAATQKRQEL MEVLLASKAR KSKQRLEAEA ARLRALAEEA AARQRAEAER EATRLKTEAE ERLRRLAEDE AAQHKADIEE SELERQKGLV EEEILALKAS LELELGRIRS | LNEYKGHLSG LKPRHPAHPM DYKQVEVTVH AQPSHWKVLS VCFLVPPPNQ AQHQALVTLW LAWQSLRRDV FRTLKPEEQR QAFLRDSQDA AEREYGSCSH QGAQEESRCQ LQLEACETRT EPARECAQRI EGLGKGVARL PEPSPAAPTL LEQVRSLSAI VIRGTQGAEE EAQAVPATLP KLRAQAEAQQ RGAQEVGERL VERWRERVAQ QTDVRQRELE ESADPLGAWL QAMPLADSQA LLEEIERHGE QYINAIKDYE EPVASPAKKP QEYVDLRTHY IKFISETLRR QRAEERERLA QLAEAHAQAK QQRMQEEWR QKRSIQEELQ QAKARQAEAA ERSRLRIEEE ELQALRARAE EEAERLRRQV QDESQRKRQA EAEAAREKQR QAEVERARQV AEAELQSKRA RSLQEEHVAV AQQQAEAERA WQLKANEALR QKSLAQAEAE RRRGKAEEQA LEKQRQLAEG ELIRLRAETE EELARLQREA EAELAKVRAE AEEESRSTSE GRFRELAEEA KRQRQLAEED VLAEKLAAIG IALKEKEAEN AFQRRRLEEQ RLAQLRKASD EDTLRQRRQV FEKAAAGKAE NAEDTLRSKE |
| | | | | | QAELEAARQR REAEERVQKS RKAALEEVER LRERAEQESA QKRLQAEEKA ELQQTLQQEQ EAARRAAEEA AAQSRRQVEE QAQARAQAQA QEAARRAQAE DAEMEKHKKF VEQELTTLRL LLDEELQRLK SQVEEELFSV KARIEAENRA RFLQEEAEKM SVAAQEAARL QRALAEKMLK RLKAEAELLQ RRLQEDKEQM FQRTLEAERQ RLKLRVAEMS QRFRKQAEEI TQEKVTLVQT DAERLREAIA QEAKLLQLKS LLQETQALQQ QRERFIEQEK VAKAQQLREE ERQRLVASME EGVRRKQEEL EELLAEENQR QHRAALAHSE KTLPNGRDAL HSFDGLRRKV LSAEELQRLA RREDVRHYLQ KATNEKLSVY GTALILLEAQ RNRRLTVNEA HHKLLSAERA QQISLFQAMQ RLLEAQIATG VPVDVAYRRG ADPSDDTKGF YLQLLERCVE LTDKAAKGGE VFEKATVSAP IWEIINSEYF QFRTGRITVE EEQEQKGRLC AELLESRVID ERSVRDVAEV NVIAGVWLEE LKKDLLPSDM TGHIIDPATS AGLVGPEFHE GYRDPYTGQS LIPREQGLRL VDPSKSHRVP | QLAAEEERRR LAAEEEAARQ LKAKVEEARR RQLQLAQEAA HAFAVQQKEQ SVLDQLRGEA EEARVQAERE AERLKQSAEE AAEKLRKEAE QAALRQKQAA AEQTLRQKAQ QLEETDHQKN AEATEAARQR RVQMEELSKL LILRDKDNTQ KQVAEEAARL RQLAEEDLAQ EKMQAVQEAT QQKELAQEQA AQQLAEETQG RQLEMSAEAE RAQARAEEDA GEKLHRTELA LEIQRQQSDH ELEREKEKLQ EEMQTVQQEQ SFLSEKDSLL AKLEQLFQDE QQRQQQQMEQ EARRRQHEAE QQLEQQRRQQ LREQLQLLEE EVTASQVAAT DGPAAEAEPE SAQRLQEAGI QGHTTVDELA GRSSIAGLLL AALQRQLLSP AASGFLLDPV VKEGVVGPEL VTGYKDPYTG KGLIVREHGI GVIDPVHSHR YFDEEMNRVL FDPNTHENLT DPETGLCLLP LVYTDSEARD FGKFQGKTVT TAEQRRDLLR KIIKIIITVV FEGLRSLVPA RELYQQLQRG DTVRRALRGA AGQKLSIYNA AVALLEAQAG ARLTVDEAVR KLLSAEKAVT VSLFQALKKG LDAQLSTGGI LDVACARGCL |
| | | | | | DEETSRALSA PSTGEPATYG LTGLSLLPLS LYSELQARET GGFKGRTVTV AEQRQELLRQ VIKILITIVE SFSGLRAPVP SRAQFEQLKD LGSVRTLLQG DTKEKVSIYE TAALLLEAQA NQRLYVHEAV EQLLSAEKAV TISLFQAMQK LLEAQIATGG PVDVAYQRGY DPSDDTKGFF RQLLERCVED KCAEKAEVVE RRAFEETQID TMSLWEVMQS LMADFQAGRV EIIEKTEIIR RRRLTAEDLF NLLREGTRSL CYLYGTGSVA LSIYQALKKG LEAQAATGFL VDEAVRKGLV AERAVTGYRD QAMKKELIPT LATGGIVDPR YQRGYLNKDT RSYVDPSTDE CRRDDGTGQL TFRGLRKQIT DEATALQLRE NLQKFLEGTS KERLSVYQAM FELLEAQAAT KLTVEEAVRM LLSAERAVTG SLFQAMKKGL EAQIATGGII EVAYKRGLFD SDDTKGFFDP LMERCITDPQ KKRERKTSSK VDPETGKEMS DHQTYLELSE SSSDGVVKSM DIDDAIAKNL AGTLSITEFA RSRSSSVGSS RTQLASWSDP LDTETLEKVS DNITGQRLLE PSTGERFPVT IMVDRINLAQ | PRADAKAYSD ELQQRCRPDQ EKAARARQEE FEKTPVEVPV WELISSEYFT FRTGKVTVEK EVETLRQERL ASELLASGVL GKTTVKDLSE SGCLAGIYLE AMRRGLLRAT ATGFLVDPVR KAGVVGPELH TGYRDPYSGS GLVLRQHGIR IIDPVHSHRV FSEEMNRVLA DPNTHENLTY PETGLRLLPL TTQVYTEEET IPGGGSHGGS DLIPEEQRAQ TKERMIIIII QQGLASYDYV EARIISLETY REALEAESAW GVYLPGSRQT LLSAEVARLL LDPVKGERLT GPELHDRLLS PYTEQTISLF EEALRLLDAQ LGFHLPLEVA HDQLSEPSEV RLSYTQLLRR LLPLSDARKL MEELVRSQVM GLTSIEEVTK CIAGVFVDAT KKGIIRPGTA GYVIDPIKGL GIVGPEFKDK YKDPYSGKLI ILKDHGIRLL DPEESHRLPV EEMNEILTDP NTEENLTYLQ TGLCLLPLKE SSVRKRRVVI VYEAYRKGLI QECEWEEITI IIDRRSGRQY IDRSALDQYR DMLSGNAGGF SSYPISPAVS TEETGPVAGI ITEAMHRNLV AQACTGGIID DAVNKGLVDK KAFCGFEDPR |
| | | | | | TKTKMSAAQA GQRFLEVQYL GRVPLDEALQ KLRDVGAYSK ISYKDALDRS LEAAAQSTKG GSTAGSRTGS GSFDATGSGF SSGYGRRYAS SAVA | LKKGWLYYEA TGGLIEPDTP RGTVDARTAQ YLTCPKTKLK MVEEGTGLRL YYSPYSVSGS RTGSRAGSRR SMTFSSSSYS GSSASLGGPE |
| 68 | PLEC | 2 | Q151492 | Entry version 224 (18 Sep. 2019) Sequence version 3 (14 Oct. 2008) | MSGEDAEVRA GSPSPGDTLP RSGGGAGSNG IRIADERDRV KHLIKAQRHI HNLISLLEVL RMRFHKLQNV QVKLVNIRND LGLIWTIILH QSEDMTAKEK GYQGLRCDNF NAIIHRHKPL TNLENLDQAF RLLDPEDVDV YVSSLYDAMP ANELQLRWQE WMRHHTAAFE IEILWSQFLK ADKNRSKGIY QLKVPPGYHP HVAILEREKQ LQRIVTKLQM QADALLQSDV RAGEVERDLD NDVQTLKDGR VYRLHERLVA AGVAAPATQV RPELEDSTLR ENQHRVDGAE QLGSHRGLHQ RARSDEGQLS LGRLDLQYAK SLESLHSFVA EKEEEEVGFD KKESYSALMR ELQNAGDRLL ESFQAALQTQ IEAHLKENAA AEGQLQKLQE SATVTRLEDL LNEYKGHLSG LKPRHPAHPM DYKQVEVTVH AQPSHWKVLS VCFLVPPPNQ AQHQALVTLW LAWQSLRRDV FRTLKPEEQR QAFLRDSQDA AEREYGSCSH | VSEDVSNGSS WNLGKTQRSR SVLDPAERAV QKKTFTKWVN SDLYEDLRDG SGDSLPREKG QIALDYLRHR DIADGNPKLT FQISDIQVSG LLLWSQRMVE TSSWRDGRLF LIDMNKVYRQ SVAERDLGVT PQPDEKSIIT RVPDVQDGVR YRELVLLLLQ ERRFPSSFEE FKEMELPAKE QSLEGAVQAG LDVEKEWGKL LRSEFERLEC EAGLCEEQLN RLLAAGKVPQ KADSMIRLLF HPQGEQMYRR IRTEYNLRLK AQVTLQSVQR YLQDLLAWVE WGVDLPSVEA SIEEFRAKIE PATRGAYRDC LLNSSKARLR AATKELMWLN WSDRNTNMTA ELELKEKKIK REDHPARPTV WSWMLQLCCC YFQFFSDVRE ALRRKYSCDR LQDAQDEKEQ LAKRAKAVVQ RGRLPLLAVC KGDECQLVGP SSGSEAAVPS EAQEAVTRLE HQLHVDMKSL QLIRSWSLAT QALHSLELHY GGFGPEDRLM HYQQLLQSLE |
| | | | | | QGAQEESRCQ LQLEACETRT EPARECAQRI EGLGKGVARL PEPSPAAPTL LEQVRSLSAI VIRGTQGAEE EAQAVPATLP KLRAQAEAQQ RGAQEVGERL VERWRERVAQ QTDVRQRELE ESADPLGAWL QAMPLADSQA LLEEIERHGE QYINAIKDYE EPVASPAKKP QEYVDLRTHY IKFISETLRR QRAEERERLA QLAEAHAQAK QQRMQEEWR QKRSIQEELQ QAKARQAEAA IRVVRLQLEA ELQALRARAE EEAERLRRQV EVELASRVKA ALQALEELRL QAEVERARQV AEAELQSKRA RSLQEEHVAV AQQQAEAERA WQLKANEALR QKSLAQAEAE RRRGKAEEQA LEKQRQLAEG ELIRLRAETE EELARLQREA EAELAKVRAE AEEESRSTSE GRFRELAEEA KRQRQLAEED VLAEKLAAIG IALKEKEAEN AFQRRRLEEQ RLAQLRKASD EDTLRQRRQV FEKAAAGKAE NAEDTLRSKE QLAAEEERRR LAAEEEAARQ LKAKVEEARR RQLQLAQEAA HAFAVQQKEQ SVLDQLRGEA EEARVQAERE AERLKQSAEE AAEKLRKEAE QAALRQKQAA | RCISELKDIR VHRLRLPLDK AEQQKAQAEV SAEAEKVLAL RSELELTLGK YLEKLKTISL VLRAHEEQLK ELEATKASLK PTFDALRDEL QQRHGERDVE LLERWQAVLA QLGRQLRYYR QDARRRQEQI VREQLRQEQA KVEECQRFAK LQLVTYKAQL KVQSGSESVI SELTTLTSQY MEEEERLAEQ EVEAALEKQR AQAEREAKEL REEAAVDAQQ QLRQSSEAEI ERSRLRIEEE TERQRGGAEG EAEAQKRQAQ QDESQRKRQA EAEAAREKQR QAEEAERRLR QVALETAQRS SFAEKTAQLE AQLREEAERR REEAERELER LRLQAEEVAQ KQKEEAEREA VRQRELAEQE TAQQRLAAEQ QGEQQRQLLE AAATQKRQEL MEVLLASKAR KSKQRLEAEA ARLRALAEEA AARQRAEAER EATRLKTEAE ERLRRLAEDE AAQHKADIEE SELERQKGLV EEEILALKAS LELELGRIRS QAELEAARQR REAEERVQKS RKAALEEVER LRERAEQESA QKRLQAEEKA ELQQTLQQEQ EAARRAAEEA AAQSRRQVEE QAQARAQAQA QEAARRAQAE DAEMEKHKKF |
| | | | | | AEQTLRQKAQ QLEETDHQKN AEATEAARQR RVQMEELSKL LILRDKDNTQ KQVAEEAARL RQLAEEDLAQ EKMQAVQEAT QQKELAQEQA AQQLAEETQG RQLEMSAEAE RAQARAEEDA GEKLHRTELA LEIQRQQSDH ELEREKEKLQ EEMQTVQQEQ SFLSEKDSLL AKLEQLFQDE QQRQQQQMEQ EARRRQHEAE QQLEQQRRQQ LREQLQLLEE EVTASQVAAT DGPAAEAEPE SAQRLQEAGI QGHTTVDELA GRSSIAGLLL AALQRQLLSP AASGFLLDPV VKEGVVGPEL VTGYKDPYTG KGLIVREHGI GVIDPVHSHR YFDEEMNRVL FDPNTHENLT DPETGLCLLP LVYTDSEARD FGKFQGKTVT TAEQRRDLLR KIIKIIITVV FEGLRSLVPA RELYQQLQRG DTVRRALRGA AGQKLSIYNA AVALLEAQAG ARLTVDEAVR KLLSAEKAVT VSLFQALKKG LDAQLSTGGI LDVACARGCL PRADAKAYSD ELQQRCRPDQ EKAARARQEE FEKTPVEVPV WELISSEYFT FRTGKVTVEK EVETLRQERL ASELLASGVL GKTTVKDLSE SGCLAGIYLE | VEQELTTLRL LLDEELQRLK SQVEEELFSV KARIEAENRA RFLQEEAEKM SVAAQEAARL QRALAEKMLK RLKAEAELLQ RRLQEDKEQM FQRTLEAERQ RLKLRVAEMS QRFRKQAEEI TQEKVTLVQT DAERLREAIA QEAKLLQLKS LLQETQALQQ QRERFIEQEK VAKAQQLREE ERQRLVASME EGVRRKQEEL EELLAEENQR QHRAALAHSE KTLPNGRDAL HSFDGLRRKV LSAEELQRLA RREDVRHYLQ KATNEKLSVY GTALILLEAQ RNRRLTVNEA HHKLLSAERA QQISLFQAMQ RLLEAQIATG VPVDVAYRRG ADPSDDTKGF YLQLLERCVE LTDKAAKGGE VFEKATVSAP IWEIINSEYF QFRTGRITVE EEQEQKGRLC AELLESRVID ERSVRDVAEV NVIAGVWLEE LKKDLLPSDM TGHIIDPATS AGLVGPEFHE GYRDPYTGQS LIPREQGLRL VDPSKSHRVP DEETSRALSA PSTGEPATYG LTGLSLLPLS LYSELQARET GGFKGRTVTV AEQRQELLRQ VIKILITIVE SFSGLRAPVP SRAQFEQLKD LGSVRTLLQG DTKEKVSIYE |
| | | | | | AMRRGLLRAT ATGFLVDPVR KAGVVGPELH TGYRDPYSGS GLVLRQHGIR IIDPVHSHRV FSEEMNRVLA DPNTHENLTY PETGLRLLPL TTQVYTEEET IPGGGSHGGS DLIPEEQRAQ TKERMIIIII QQGLASYDYV EARIISLETY REALEAESAW GVYLPGSRQT LLSAEVARLL LDPVKGERLT GPELHDRLLS PYTEQTISLF EEALRLLDAQ LGFHLPLEVA HDQLSEPSEV RLSYTQLLRR LLPLSDARKL MEELVRSQVM GLTSIEEVTK CIAGVFVDAT KKGIIRPGTA GYVIDPIKGL GIVGPEFKDK YKDPYSGKLI ILKDHGIRLL DPEESHRLPV EEMNEILTDP NTEENLTYLQ TGLCLLPLKE SSVRKRRVVI VYEAYRKGLI QECEWEEITI IIDRRSGRQY IDRSALDQYR DMLSGNAGGF SSYPISPAVS TEETGPVAGI ITEAMHRNLV AQACTGGIID DAVNKGLVDK KAFCGFEDPR LKKGWLYYEA TGGLIEPDTP RGTVDARTAQ YLTCPKTKLK MVEEGTGLRL YYSPYSVSGS RTGSRAGSRR SMTFSSSSYS GSSASLGGPE | TAALLLEAQA NQRLYVHEAV EQLLSAEKAV TISLFQAMQK LLEAQIATGG PVDVAYQRGY DPSDDTKGFF RQLLERCVED KGAEKAEVVE RRAFEETQID TMSLWEVMQS LMADFQAGRV EIIEKTEIIR RRRLTAEDLF NLLREGTRSL CYLYGTGSVA LSIYQALKKG LEAQAATGFL VDEAVRKGLV AERAVTGYRD QAMKKELIPT LATGGIVDPR YQRGYLNKDT RSYVDPSTDE CRRDDGTGQL TFRGLRKQIT DEATALQLRE NLQKFLEGTS KERLSVYQAM FELLEAQAAT KLTVEEAVRM LLSAERAVTG SLFQAMKKGL EAQIATGGII EVAYKRGLFD SDDTKGFFDP LMERCITDPQ KKRERKTSSK VDPETGKEMS DHQTYLELSE SSSDGVVKSM DIDDAIAKNL AGTLSITEFA RSRSSSVGSS RTQLASWSDP LDTETLEKVS DNITGQRLLE PSTGERFPVT IMVDRINLAQ TKTKMSAAQA GQRFLEVQYL GRVPLDEALQ KLRDVGAYSK ISYKDALDRS LEAAAQSTKG GSTAGSRTGS GSFDATGSGF SSGYGRRYAS SAVA |
| 69 | PLEC | 3 | Q15149-3 | Entry version | MSGEDAEVRA | VSEDVSNGSS |
| | | | | 224 (18 Sep. 2019) Sequence version 3 (14 Oct. 2008) | GSPSPGDTLP RSGGGAGSNG IRIADERDRV KHLIKAQRHI HNLISLLEVL RMRFHKLQNV QVKLVNIRND LGLIWTIILH QSEDMTAKEK GYQGLRCDNF NAIIHRHKPL TNLENLDQAF RLLDPEDVDV YVSSLYDAMP QLRWQEYREL HTAAFEERRF WSQFLKFKEM RSKGIYQSLE PPGYHPLDVE LEREKQLRSE VTKLQMEAGL LLQSDVRLLA VERDLDKADS TLKDGRHPQG HERLVAIRTE APATQVAQVT EDSTLRYLQD RVDGAEWGVD HRGLHQSIEE DEGQLSPATR DLQYAKLLNS LHSFVAAATK EEVGFDWSDR YSALMRELEL AGDRLLREDH AALQTQWSWM LKENAAYFQF LQKLQEALRR TRLEDLLQDA KGHLSGLAKR HPAHPMRGRL VEVTVHKGDE HWKVLSSSGS VPPPNQEAQE ALVTLWHQLH SLRRDVQLIR KPEEQRQALH RDSQDAGGFG YGSCSHHYQQ EESRCQRCIS ACETRTVHRL ECAQRIAEQQ KGVARLSAEA PAAPTLRSEL RSLSAIYLEK TQGAEEVLRA VPATLPELEA QAEAQQPTFD EVGERLQQRH RERVAQLLER | WNLGKTQRSR SVLDPAERAV QKKTFTKWVN SDLYEDLRDG SGDSLPREKG QIALDYLRHR DIADGNPKLT FQISDIQVSG LLLWSQRMVE TSSWRDGRLF LIDMNKVYRQ SVAERDLGVT PQPDEKSIIT RVPDVQDGEL VLLLLQWMRH PSSFEEIEIL ELPAKEADKN GAVQAGQLKV KEWGKLHVAI FERLECLQRI CEEQLNQADA AGKVPQRAGE MIRLLFNDVQ EQMYRRVYRL YNLRLKAGVA LQSVQRRPEL LLAWVEENQH LPSVEAQLGS FRAKIERARS GAYRDCLGRL SKARLRSLES ELMWLNEKEE NTNMTAKKES KEKKIKELQN PARPTVESFQ LQLCCCIEAH FSDVREAEGQ KYSCDRSATV QDEKEQLNEY AKAVVQLKPR PLLAVCDYKQ CQLVGPAQPS EAAVPSVCFL AVTRLEAQHQ VDMKSLLAWQ SWSLATFRTL SLELHYQAFL PEDRLMAERE LLQSLEQGAQ ELKDIRLQLE RLPLDKEPAR KAQAEVEGLG EKVLALPEPS ELTLGKLEQV LKTISLVIRG HEEQLKEAQA TKASLKKLRA ALRDELRGAQ GERDVEVERW WQAVLAQTDV |
| | | | | | RQRELEQLGR PLGAWLQDAR LADSQAVREQ IERHGEKVEE AIKDYELQLV SPAKKPKVQS DLRTHYSELT SETLRRMEEE ERERLAEVEA AHAQAKAQAE QEEWRREEA IQEELQQLRQ RQAEAAERSR RLQLEATERQ LRARAEEAEA RLRRQVQDES ASRVKAEAEA LEELRLQAEE ERARQVQVAL LQSKRASFAE EEHVAVAQLR AEAERAREEA ANEALRLRLQ AQAEAEKQKE KAEEQAVRQR RQLAEGTAQQ LRAETEQGEQ RLQREAAAAT AKVRAEMEVL SRSTSEKSKQ ELAEEAARLR QLAEEDAARQ KLAAIGEATR EKEAENERLR RRLEEQAAQH LRKASDSELE RQRRQVEEEI AAGKAELELE TLRSKEQAEL EEERRRREAE EEAARQRKAA VEEARRLRER LAQEAAQKRL VQQKEQELQQ QLRGEAEAAR VQAEREAAQS KQSAEEQAQA LRKEAEQEAA RQKQAADAEM LRQKAQVEQE TDHQKNLLDE EAARQRSQVE EELSKLKARI DKDNTQRFLQ EEAARLSVAA EEDLAQQRAL AVQEATRLKA LAQEQARRLQ AEETQGFQRT MSAEAERLKL | QLRYYRESAD RRQEQIQAMP LRQEQALLEE CQRFAKQYIN TYKAQLEPVA GSESVIQEYV TLTSQYIKFI ERLAEQQRAE ALEKQRQLAE REAKELQQRM AVDAQQQKRS SSEAEIQAKA LRIEEEIRVV RGGAEGELQA QKRQAQEEAE QRKRQAEVEL AREKQRALQA AERRLRQAEV ETAQRSAEAE KTAQLERSLQ EEAERRAQQQ ERELERWQLK AEEVAQQKSL EAEREARRRG ELAEQELEKQ RLAAEQELIR QRQLLEEELA QKRQELEAEL LASKARAEEE RLEAEAGRFR ALAEEAKRQR RAEAERVLAE LKTEAEIALK RLAEDEAFQR KADIEERLAQ RQKGLVEDTL LALKASFEKA LGRIRSNAED EAARQRQLAA ERVQKSLAAE LEEVERLKAK AEQESARQLQ QAEEKAHAFA TLQQEQSVLD RAAEEAEEAR RRQVEEAERL RAQAQAAAEK RRAQAEQAAL EKHKKFAEQT LTTLRLQLEE ELQRLKAEAT EELFSVRVQM EAENRALILR EEAEKMKQVA QEAARLRQLA AEKMLKEKMQ EAELLQQQKE EDKEQMAQQL LEAERQRQLE RVAEMSRAQA |
| | | | | | RAEEDAQRFR HRTELATQEK RQQSDHDAER EKEKLQQEAK TVQQEQLLQE EKDSLLQRER QLFQDEVAKA QQQMEQERQR RQHEAEEGVR QQRRQQEELL LQLLEEQHRA SQVAATKTLP AEAEPEHSFD LQEAGILSAE TVDELARRED IAGLLLKATN RQLLSPGTAL FLLDPVRNRR VVGPELHHKL KDPYTGQQIS VREHGIRLLE PVHSHRVPVD EMNRVLADPS THENLTYLQL GLCLLPLTDK DSEARDVFEK QGKTVTIWEI RRDLLRQFRT IIITVVEEQE RSLVPAAELL QQLQRGERSV RALRGANVIA LSIYNALKKD LEAQAGTGHI VDEAVRAGLV AEKAVTGYRD QALKKGLIPR LSTGGIVDPS CARGCLDEET AKAYSDPSTG RCRPDQLTGL RARQEELYSE PVEVPVGGFK SSEYFTAEQR KVTVEKVIKI LRQERLSFSG LASGVLSRAQ VKDLSELGSV AGIYLEDTKE GLLRATTAAL LVDPVRNQRL VGPELHEQLL DPYSGSTISL RQHGIRLLEA VHSHRVPVDV MNRVLADPSD HENLTYRQLL LRLLPLKGAE YTEEETRRAF GSHGGSTMSL | KQAEEIGEKL VTLVQTLEIQ LREAIAELER LLQLKSEEMQ TQALQQSFLS FIEQEKAKLE QQLREEQQRQ LVASMEEARR RKQEELQQLE AEENQRLREQ ALAHSEEVTA NGRDALDGPA GLRRKVSAQR ELQRLAQGHT VRHYLQGRSS EKLSVYAALQ ILLEAQAASG LTVNEAVKEG LSAERAVTGY LFQAMQKGLI AQIATGGVID VAYRRGYFDE DDTKGFFDPN LERCVEDPET AAKGGELVYT ATVSAPFGKF INSEYFTAEQ GRITVEKIIK QKGRLCFEGL ESRVIDRELY RDVAEVDTVR GVWLEEAGQK LLPSDMAVAL IDPATSARLT GPEFHEKLLS PYTGQSVSLF EQGLRLLDAQ KSHRVPLDVA SRALSAPRAD EPATYGELQQ SLLPLSEKAA LQARETFEKT GRTVTVWELI QELLRQFRTG LITIVEEVET LRAPVPASEL FEQLKDGKTT RTLLQGSGCL KVSIYEAMRR LLEAQAATGF YVHEAVKAGV SAEKAVTGYR FQAMQKGLVL QIATGGIIDP AYQRGYFSEE DTKGFFDPNT ERCVEDPETG KAEVVETTQV EETQIDIPGG WEVMQSDLIP |
| | | | | | EEQRAQLMAD MIIIIIEIIE ASYDYVRRRL ISLETYNLLR EAESAWCYLY PGSRQTLSIY EVARLLLEAQ KGERLTVDEA HDRLLSAERA QTISLFQAMK RLLDAQLATG LPLEVAYQRG SEPSEVRSYV TQLLRRCRRD SDARKLTFRG VRSQVMDEAT IEEVTKNLQK VFVDATKERL IRPGTAFELL DPIKGLKLTV PEFKDKLLSA YSGKLISLFQ HGIRLLEAQI SHRLPVEVAY EILTDPSDDT NLTYLQLMER LLPLKEKKRE KRRVVIVDPE YRKGLIDHQT WEEITISSSD RSGRQYDIDD ALDQYRAGTL GNAGGFRSRS ISPAVSRTQL GPVAGILDTE MHRNLVDNIT TGGIIDPSTG KGLVDKIMVD GFEDPRTKTK WLYYEAGQRF IEPDTPGRVP DARTAQKLRD PKTKLKISYK GTGLRLLEAA YSVSGSGSTA RAGSRRGSFD SSSSYSSSGY SLGGPESAVA | FQAGRVTKER KTEIIRQQGL TAEDLFEARI EGTRSLREAL GTGSVAGVYL QALKKGLLSA AATGFLLDPV VRKGLVGPEL VTGYRDPYTE KELIPTEEAL GIVDPRLGFH YLNKDTHDQL DPSTDERLSY DGTGQLLLPL LRKQITMEEL ALQLREGLTS FLEGTSCIAG SVYQAMKKGI EAQAATGYVI EEAVRMGIVG ERAVTGYKDP AMKKGLILKD ATGGIIDPEE KRGLFDEEMN KGFFDPNTEE CITDPQTGLC RKTSSKSSVR TGKEMSVYEA YLELSEQECE GWKSMIIDR AIAKNLIDRS SITEFADMLS SSVGSSSSYP ASWSDPTEET TLEKVSITEA GQRLLEAQAC ERFPVTDAVN RINLAQKAFC MSAAQALKKG LEVQYLTGGL LDEALQRGTV VGAYSKYLTC DALDRSMVEE AQSTKGYYSP GSRTGSRTGS ATGSGFSMTF GRRYASGSSA |
| 70 | PLEC | 4 | Q151494 | Entry version224 (18 Sep. 2019)Sequence version 3 (14 Oct. 2008) | MSQHQLRVPQ SEDNLYLAVL DRVQKKTFTK RHISDLYEDL EVLSGDSLPR QNVQIALDYL RNDDIADGNP ILHFQISDIQ KEKLLLWSQR DNFTSSWRDG KPLLIDMNKV | PEGLGRKRTS RASEGKKDER WVNKHLIKAQ RDGHNLISLL EKGRMRFHKL RHRQVKLVNI KLTLGLIWTI VSGQSEDMTA MVEGYQGLRC RLFNAIIHRH YRQTNLENLD |
| | | | | | QAFSVAERDL VDVPQPDEKS AMPRVPDVQD WQEYRELVLL AFEERRFPSS FLKFKEMELP GIYQSLEGAV YHPLDVEKEW EKQLRSEFER LQMEAGLCEE SDVRLLAAGK DLDKADSMIR DGRHPQGEQM LVAIRTEYNL TQVAQVTLQS TLRYLQDLLA GAEWGVDLPS LHQSIEEFRA QLSPATRGAY YAKLLNSSKA FVAAATKELM GFDWSDRNTN LMRELELKEK RLLREDHPAR QTQWSWMLQL NAAYFQFFSD LQEALRRKYS EDLLQDAQDE LSGLAKRAKA HPMRGRLPLL TVHKGDECQL VLSSSGSEAA PNQEAQEAVT TLWHQLHVDM RDVQLIRSWS EQRQALHSLE QDAGGFGPED CSHHYQQLLQ RCQRCISELK TRTVHRLRLP QRIAEQQKAQ ARLSAEAEKV PTLRSELELT SAIYLEKLKT AEEVLRAHEE TLPELEATKA AQQPTFDALR ERLQQRHGER VAQLLERWQA ELEQLGRQLR AWLQDARRRQ SQAVREQLRQ HGEKVEECQR DYELQLVTYK KKPKVQSGSE THYSELTTLT LRRMEEEERL RLAEVEAALE QAKAQAEREA VVRREEAAVD | GVTRLLDPED IITYVSSLYD GVRANELQLR LLQWMRHHTA FEEIEILWSQ AKEADKNRSK QAGQLKVPPG GKLHVAILER LECLQRIVTK QLNQADALLQ VPQRAGEVER LLFNDVQTLK YRRVYRLHER RLKAGVAAPA VQRRPELEDS WVEENQHRVD VEAQLGSHRG KIERARSDEG RDCLGRLDLQ RLRSLESLHS WLNEKEEEEV MTAKKESYSA KIKELQNAGD PTVESFQAAL CCCIEAHLKE VREAEGQLQK CDRSATVTRL KEQLNEYKGH VVQLKPRHPA AVCDYKQVEV VGPAQPSHWK VPSVCFLVPP RLEAQHQALV KSLLAWQSLR LATFRTLKPE LHYQAFLRDS RLMAEREYGS SLEQGAQEES DIRLQLEACE LDKEPARECA AEVEGLGKGV LALPEPSPAA LGKLEQVRSL ISLVIRGTQG QLKEAQAVPA SLKKLRAQAE DELRGAQEVG DVEVERWRER VLAQTDVRQR YYRESADPLG EQIQAMPLAD EQALLEEIER FAKQYINAIK AQLEPVASPA SVIQEYVDLR SQYIKFISET AEQQRAEERE KQRQLAEAHA KELQQRMQEE AQQQKRSIQE |
| | | | | | ELQQLRQSSE EAAERSRLRI LEATERQRGG RAEEAEAQKR RQVQDESQRK VKAEAEAARE LRLQAEEAER RQVQVALETA KRASFAEKTA VAVAQLREEA ERAREEAERE ALRLRLQAEE EAEKQKEEAE EQAVRQRELA AEGTAQQRLA ETEQGEQQRQ REAAAATQKR RAEMEVLLAS TSEKSKQRLE EEAARLRALA EEDAARQRAE AIGEATRLKT AENERLRRLA EEQAAQHKAD ASDSELERQK RQVEEEILAL KAELELELGR SKEQAELEAA RRRREAEERV ARQRKAALEE ARRLRERAEQ EAAQKRLQAE KEQELQQTLQ GEAEAARRAA EREAAQSRRQ AEEQAQARAQ EAEQEAARRA QAADAEMEKH KAQVEQELTT QKNLLDEELQ RQRSQVEEEL SKLKARIEAE NTQRFLQEEA ARLSVAAQEA LAQQRALAEK EATRLKAEAE EQARRLQEDK TQGFQRTLEA EAERLKLRVA EDAQRFRKQA ELATQEKVTL SDHDAERLRE KLQQEAKLLQ QEQLLQETQA SLLQRERFIE QDEVAKAQQL MEQERQRLVA EAEEGVRRKQ RQQEELLAEE LEEQHRAALA | AEIQAKARQA EEEIRVVRLQ AEGELQALRA QAQEEAERLR RQAEVELASR KQRALQALEE RLRQAEVERA QRSAEAELQS QLERSLQEEH ERRAQQQAEA LERWQLKANE VAQQKSLAQA REARRRGKAE EQELEKQRQL AEQELIRLRA LLEEELARLQ QELEAELAKV KARAEEESRS AEAGRFRELA EEAKRQRQLA AERVLAEKLA EAEIALKEKE EDEAFQRRRL IEERLAQLRK GLVEDTLRQR KASFEKAAAG IRSNAEDTLR RQRQLAAEEE QKSLAAEEEA VERLKAKVEE ESARQLQLAQ EKAHAFAVQQ QEQSVLDQLR EEAEEARVQA VEEAERLKQS AQAAAEKLRK QAEQAALRQK KKFAEQTLRQ LRLQLEETDH RLKAEATEAA FSVRVQMEEL NRALILRDKD EKMKQVAEEA ARLRQLAEED MLKEKMQAVQ LLQQQKELAQ EQMAQQLAEE ERQRQLEMSA EMSRAQARAE EEIGEKLHRT VQTLEIQRQQ AIAELEREKE LKSEEMQTVQ LQQSFLSEKD QEKAKLEQLF REEQQRQQQQ SMEEARRRQH EELQQLEQQR NQRLREQLQL HSEEVTASQV |
| | | | | | AATKTLPNGR EPEHSFDGLR AGILSAEELQ ELARREDVRH LLLKATNEKL LSPGTALILL DPVRNRRLTV PELHHKLLSA YTGQQISLFQ HGIRLLEAQI SHRVPVDVAY RVLADPSDDT NLTYLQLLER LLPLTDKAAK ARDVFEKATV TVTIWEIINS LLRQFRTGRI TVVEEQEQKG VPAAELLESR QRGERSVRDV RGANVIAGVW YNALKKDLLP QAGTGHIIDP AVRAGLVGPE AVTGYRDPYT KKGLIPREQG GGIVDPSKSH GCLDEETSRA YSDPSTGEPA PDQLTGLSLL QEELYSELQA VPVGGFKGRT YFTAEQRQEL VEKVIKILIT ERLSFSGLRA GVLSRAQFEQ LSELGSVRTL YLEDTKEKVS RATTAALLLE PVRNQRLYVH ELHEQLLSAE SGSTISLFQA GIRLLEAQIA HRVPVDVAYQ VLADPSDDTK LTYRQLLERC LPLKGAEKAE EETRRAFEET GGSTMSLWEV RAQLMADFQA IIIEIIEKTE DYVRRRLTAE ETYNLLREGT SAWCYLYGTG RQTLSIYQAL RLLLEAQAAT RLTVDEAVRK LLSAERAVTG SLFQAMKKEL DAQLATGGIV | DALDGPAAEA RKVSAQRLQE RLAQGHTTVD YLQGRSSIAG SVYAALQRQL EAQAASGFLL NEAVKEGVVG ERAVTGYKDP AMQKGLIVRE ATGGVIDPVH RRGYFDEEMN KGFFDPNTHE CVEDPETGLC GGELVYTDSE SAPFGKFQGK EYFTAEQRRD TVEKIIKIII RLCFEGLRSL VIDRELYQQL AEVDTVRRAL LEEAGQKLSI SDMAVALLEA ATSARLTVDE FHEKLLSAEK GQSVSLFQAL LRLLDAQLST RVPLDVACAR LSAPRADAKA TYGELQQRCR PLSEKAARAR RETFEKTPVE VTVWELISSE LRQFRTGKVT IVEEVETLRQ PVPASELLAS LKDGKTTVKD LQGSGCLAGI IYEAMRRGLL AQAATGFLVD EAVKAGWGP KAVTGYRDPY MQKGLVLRQH TGGIIDPVHS RGYFSEEMNR GFFDPNTHEN VEDPETGLRL VVETTQVYTE QIDIPGGGSH MQSDLIPEEQ GRVTKERMII IIRQQGLASY DLFEARIISL RSLREALEAE SVAGVYLPGS KKGLLSAEVA GFLLDPVKGE GLVGPELHDR YRDPYTEQTI IPTEEALRLL DPRLGFHLPL |
| | | | | | EVAYQRGYLN SEVRSYVDPS LRRCRRDDGT RKLTFRGLRK QVMDEATALQ VTKNLQKFLE DATKERLSVY GTAFELLEAQ KGLKLTVEEA KDKLLSAERA KLISLFQAMK RLLEAQIATG LPVEVAYKRG TDPSDDTKGF YLQLMERCIT LKEKKRERKT WIVDPETGK GLIDHQTYLE ITISSSDGVV RQYDIDDAIA QYRAGTLSIT GGFRSRSSSV AVSRTQLASW AGILDTETLE NLVDNITGQR IIDPSTGERF VDKIMVDRIN DPRTKTKMSA YEAGQRFLEV DTPGRVPLDE TAQKLRDVGA KLKISYKDAL LRLLEAAAQS SGSGSTAGSR SRRGSFDATG SYSSSGYGRR GPESAVA | KDTHDQLSEP TDERLSYTQL GQLLLPLSDA QITMEELVRS LREGLTSIEE GTSCIAGVFV QAMKKGIIRP AATGYVIDPI VRMGIVGPEF VTGYKDPYSG KGLILKDHGI GIIDPEESHR LFDEEMNEIL FDPNTEENLT DPQTGLCLLP SSKSSVRKRR EMSVYEAYRK LSEQECEWEE KSMIIDRRSG KNLIDRSALD EFADMLSGNA GSSSSYPISP SDPTEETGPV KVSITEAMHR LLEAQACTGG PVTDAVNKGL LAQKAFCGFE AQALKKGWLY QYLTGGLIEP ALQRGTVDAR YSKYLTCPKT DRSMVEEGTG TKGYYSPYSV TGSRTGSRAG SGFSMTFSSS YASGSSASLG |
| 71 | PLEC | 5 | Q151495 | Entry version 224 (18 Sep. 2019) Sequence version 3 (14 Oct. 2008) | MEPSGSLFPS AAVWHWRRGR DRVQKKTFTK RHISDLYEDL EVLSGDSLPR QNVQIALDYL RNDDIADGNP ILHFQISDIQ KEKLLLWSQR DNFTSSWRDG KPLLIDMNKV QAFSVAERDL VDVPQPDEKS AMPRVPDVQD WQEYRELVLL AFEERRFPSS FLKFKEMELP GIYQSLEGAV YHPLDVEKEW EKQLRSEFER LQMEAGLCEE SDVRLLAAGK | LVVVGHVVTL RWAQDEQDER WVNKHLIKAQ RDGHNLISLL EKGRMRFHKL RHRQVKLVNI KLTLGLIWTI VSGQSEDMTA MVEGYQGLRC RLFNAIIHRH YRQTNLENLD GVTRLLDPED IITYVSSLYD GVRANELQLR LLQWMRHHTA FEEIEILWSQ AKEADKNRSK QAGQLKVPPG GKLHVAILER LECLQRIVTK QLNQADALLQ VPQRAGEVER |
| | | | | | DLDKADSMIR DGRHPQGEQM LVAIRTEYNL TQVAQVTLQS TLRYLQDLLA GAEWGVDLPS LHQSIEEFRA QLSPATRGAY YAKLLNSSKA WLNEKEEEEV GFDWSDRNTN LMRELELKEK RLLREDHPAR QTQWSWMLQL NAAYFQFFSD LQEALRRKYS EDLLQDAQDE LSGLAKRAKA HPMRGRLPLL TVHKGDECQL VLSSSGSEAA PNQEAQEAVT TLWHQLHVDM RDVQLIRSWS EQRQALHSLE QDAGGFGPED CSHHYQQLLQ RCQRCISELK TRTVHRLRLP QRIAEQQKAQ ARLSAEAEKV PTLRSELELT SAIYLEKLKT AEEVLRAHEE TLPELEATKA AQQPTFDALR ERLQQRHGER VAQLLERWQA ELEQLGRQLR AWLQDARRRQ SQAVREQLRQ HGEKVEECQR DYELQLVTYK KKPKVQSGSE THYSELTTLT LRRMEEEERL RLAEVEAALE QAKAQAEREA VVRREEAAVD ELQQLRQSSE EAAERSRLRI LEATERQRGG RAEEAEAQKR RQVQDESQRK VKAEAEAARE LRLQAEEAER RQVQVALETA KRASFAEKTA VAVAQLREEA ERAREEAERE | LLFNDVQTLK YRRVYRLHER RLKAGVAAPA VQRRPELEDS WVEENQHRVD VEAQLGSHRG KIERARSDEG RDCLGRLDLQ RLRSLESLHS FVAAATKELM MTAKKESYSA KIKELQNAGD PTVESFQAAL CCCIEAHLKE VREAEGQLQK CDRSATVTRL KEQLNEYKGH VVQLKPRHPA AVCDYKQVEV VGPAQPSHWK VPSVCFLVPP RLEAQHQALV KSLLAWQSLR LATFRTLKPE LHYQAFLRDS RLMAEREYGS SLEQGAQEES DIRLQLEACE LDKEPARECA AEVEGLGKGV LALPEPSPAA LGKLEQVRSL ISLVIRGTQG QLKEAQAVPA SLKKLRAQAE DELRGAQEVG DVEVERWRER VLAQTDVRQR YYRESADPLG EQIQAMPLAD EQALLEEIER FAKQYINAIK AQLEPVASPA SVIQEYVDLR SQYIKFISET AEQQRAEERE KQRQLAEAHA KELQQRMQEE AQQQKRSIQE AEIQAKARQA EEEIRVVRLQ AEGELQALRA QAQEEAERLR RQAEVELASR KQRALQALEE RLRQAEVERA QRSAEAELQS QLERSLQEEH ERRAQQQAEA LERWQLKANE |
| | | | | | ALRLRLQAEE EAEKQKEEAE EQAVRQRELA AEGTAQQRLA ETEQGEQQRQ REAAAATQKR RAEMEVLLAS TSEKSKQRLE EEAARLRALA EEDAARQRAE AIGEATRLKT AENERLRRLA EEQAAQHKAD ASDSELERQK RQVEEEILAL KAELELELGR SKEQAELEAA RRRREAEERV ARQRKAALEE ARRLRERAEQ EAAQKRLQAE KEQELQQTLQ GEAEAARRAA EREAAQSRRQ AEEQAQARAQ EAEQEAARRA QAADAEMEKH KAQVEQELTT QKNLLDEELQ RQRSQVEEEL SKLKARIEAE NTQRFLQEEA ARLSVAAQEA LAQQRALAEK EATRLKAEAE EQARRLQEDK TQGFQRTLEA EAERLKLRVA EDAQRFRKQA ELATQEKVTL SDHDAERLRE KLQQEAKLLQ QEQLLQETQA SLLQRERFIE QDEVAKAQQL MEQERQRLVA EAEEGVRRKQ RQQEELLAEE LEEQHRAALA AATKTLPNGR EPEHSFDGLR AGILSAEELQ ELARREDVRH LLLKATNEKL LSPGTALILL DPVRNRRLTV PELHHKLLSA YTGQQISLFQ HGIRLLEAQI SHRVPVDVAY | VAQQKSLAQA REARRRGKAE EQELEKQRQL AEQELIRLRA LLEEELARLQ QELEAELAKV KARAEEESRS AEAGRFRELA EEAKRQRQLA AERVLAEKLA EAEIALKEKE EDEAFQRRRL IEERLAQLRK GLVEDTLRQR KASFEKAAAG IRSNAEDTLR RQRQLAAEEE QKSLAAEEEA VERLKAKVEE ESARQLQLAQ EKAHAFAVQQ QEQSVLDQLR EEAEEARVQA VEEAERLKQS AQAAAEKLRK QAEQAALRQK KKFAEQTLRQ LRLQLEETDH RLKAEATEAA FSVRVQMEEL NRALILRDKD EKMKQVAEEA ARLRQLAEED MLKEKMQAVQ LLQQQKELAQ EQMAQQLAEE ERQRQLEMSA EMSRAQARAE EEIGEKLHRT VQTLEIQRQQ AIAELEREKE LKSEEMQTVQ LQQSFLSEKD QEKAKLEQLF REEQQRQQQQ SMEEARRRQH EELQQLEQQR NQRLREQLQL HSEEVTASQV DALDGPAAEA RKVSAQRLQE RLAQGHTTVD YLQGRSSIAG SVYAALQRQL EAQAASGFLL NEAVKEGVVG ERAVTGYKDP AMQKGLIVRE ATGGVIDPVH RRGYFDEEMN |
| | | | | | RVLADPSDDT NLTYLQLLER LLPLTDKAAK ARDVFEKATV TVTIWEIINS LLRQFRTGRI TVVEEQEQKG VPAAELLESR QRGERSVRDV RGANVIAGVW YNALKKDLLP QAGTGHIIDP AVRAGLVGPE AVTGYRDPYT KKGLIPREQG GGIVDPSKSH GCLDEETSRA YSDPSTGEPA PDQLTGLSLL QEELYSELQA VPVGGFKGRT YFTAEQRQEL VEKVIKILIT ERLSFSGLRA GVLSRAQFEQ LSELGSVRTL YLEDTKEKVS RATTAALLLE PVRNQRLYVH ELHEQLLSAE SGSTISLFQA GIRLLEAQIA HRVPVDVAYQ VLADPSDDTK LTYRQLLERC LPLKGAEKAE EETRRAFEET GGSTMSLWEV RAQLMADFQA IIIEIIEKTE DYVRRRLTAE ETYNLLREGT SAWCYLYGTG RQTLSIYQAL RLLLEAQAAT RLTVDEAVRK LLSAERAVTG SLFQAMKKEL DAQLATGGIV EVAYQRGYLN SEVRSYVDPS LRRCRRDDGT RKLTFRGLRK QVMDEATALQ VTKNLQKFLE DATKERLSVY GTAFELLEAQ KGLKLTVEEA KDKLLSAERA KLISLFQAMK | KGFFDPNTHE CVEDPETGLC GGELVYTDSE SAPFGKFQGK EYFTAEQRRD TVEKIIKIII RLCFEGLRSL VIDRELYQQL AEVDTVRRAL LEEAGQKLSI SDMAVALLEA ATSARLTVDE FHEKLLSAEK GQSVSLFQAL LRLLDAQLST RVPLDVACAR LSAPRADAKA TYGELQQRCR PLSEKAARAR RETFEKTPVE VTVWELISSE LRQFRTGKVT IVEEVETLRQ PVPASELLAS LKDGKTTVKD LQGSGCLAGI IYEAMRRGLL AQAATGFLVD EAVKAGWGP KAVTGYRDPY MQKGLVLRQH TGGIIDPVHS RGYFSEEMNR GFFDPNTHEN VEDPETGLRL WETTQVYTE QIDIPGGGSH MQSDLIPEEQ GRVTKERMII IIRQQGLASY DLFEARIISL RSLREALEAE SVAGVYLPGS KKGLLSAEVA GFLLDPVKGE GLVGPELHDR YRDPYTEQTI IPTEEALRLL DPRLGFHLPL KDTHDQLSEP TDERLSYTQL GQLLLPLSDA QITMEELVRS LREGLTSIEE GTSCIAGVFV QAMKKGIIRP AATGYVIDPI VRMGIVGPEF VTGYKDPYSG KGLILKDHGI |
| | | | | | RLLEAQIATG LPVEVAYKRG TDPSDDTKGF YLQLMERCIT LKEKKRERKT WIVDPETGK GLIDHQTYLE ITISSSDGVV RQYDIDDAIA QYRAGTLSIT GGFRSRSSSV AVSRTQLASW AGILDTETLE NLVDNITGQR IIDPSTGERF VDKIMVDRIN DPRTKTKMSA YEAGQRFLEV DTPGRVPLDE TAQKLRDVGA KLKISYKDAL LRLLEAAAQS SGSGSTAGSR SRRGSFDATG SYSSSGYGRR GPESAVA | GIIDPEESHR LFDEEMNEIL FDPNTEENLT DPQTGLCLLP SSKSSVRKRR EMSVYEAYRK LSEQECEWEE KSMIIDRRSG KNLIDRSALD EFADMLSGNA GSSSSYPISP SDPTEETGPV KVSITEAMHR LLEAQACTGG PVTDAVNKGL LAQKAFCGFE AQALKKGWLY QYLTGGLIEP ALQRGTVDAR YSKYLTCPKT DRSMVEEGTG TKGYYSPYSV TGSRTGSRAG SGFSMTFSSS YASGSSASLG |
| 72 | PLEC | 6 | Q151496 | Entry version 224 (18 Sep. 2019) Sequence version 3 (14 Oct. 2008) | MSGAGGAFAS WLDGGCEPAR VDERDRVQKK IKAQRHISDL ISLLEVLSGD FHKLQNVQIA LVNIRNDDIA IWTIILHFQI DMTAKEKLLL GLRCDNFTSS IHRHKPLLID ENLDQAFSVA DPEDVDVPQP SLYDAMPRVP LQLRWQEYRE HHTAAFEERR LWSQFLKFKE NRSKGIYQSL VPPGYHPLDV ILEREKQLRS IVTKLQMEAG ALLQSDVRLL EVERDLDKAD QTLKDGRHPQ LHERLVAIRT AAPATQVAQV LEDSTLRYLQ HRVDGAEWGV SHRGLHQSIE SDEGQLSPAT LDLQYAKLLN SLHSFVAAAT EEEVGFDWSD | PREVLLERPC RGYLYQQLCC TFTKWVNKHL YEDLRDGHNL SLPREKGRMR LDYLRHRQVK DGNPKLTLGL SDIQVSGQSE WSQRMVEGYQ WRDGRLFNAI MNKVYRQTNL ERDLGVTRLL DEKSIITYVS DVQDGVRANE LVLLLLQWMR FPSSFEEIEI MELPAKEADK EGAVQAGQLK EKEWGKLHVA EFERLECLQR LCEEQLNQAD AAGKVPQRAG SMIRLLFNDV GEQMYRRVYR EYNLRLKAGV TLQSVQRRPE DLLAWVEENQ DLPSVEAQLG EFRAKIERAR RGAYRDCLGR SSKARLRSLE KELMWLNEKE RNTNMTAKKE |
| | | | | | SYSALMRELE NAGDRLLRED QAALQTQWSW HLKENAAYFQ QLQKLQEALR VTRLEDLLQD YKGHLSGLAK RHPAHPMRGR QVEVTVHKGD SHWKVLSSSG LVPPPNQEAQ QALVTLWHQL QSLRRDVQLI LKPEEQRQAL LRDSQDAGGF EYGSCSHHYQ QEESRCQRCI EACETRTVHR RECAQRIAEQ GKGVARLSAE SPAAPTLRSE VRSLSAIYLE GTQGAEEVLR AVPATLPELE AQAEAQQPTF QEVGERLQQR HGERDVEVER VRQRELEQLG DPLGAWLQDA PLADSQAVRE EIERHGEKVE NAIKDYELQL ASPAKKPKVQ VDLRTHYSEL ISETLRRMEE EERERLAEVE EAHAQAKAQA MQEEWRREE SIQEELQQLR ARQAEAAERS VRLQLEATER ALRARAEEAE ERLRRQVQDE LASRVKAEAE ALEELRLQAE VERARQVQVA ELQSKRASFA QEEHVAVAQL QAEAERAREE KANEALRLRL LAQAEAEKQK GKAEEQAVRQ QRQLAEGTAQ RLRAETEQGE ARLQREAAAA LAKVRAEMEV ESRSTSEKSK RELAEEAARL RQLAEEDAAR EKLAAIGEAT | LKEKKIKELQ HPARPTVESF MLQLCCCIEA FFSDVREAEG RKYSCDRSAT AQDEKEQLNE RAKAVVQLKP LPLLAVCDYK ECQLVGPAQP SEAAVPSVCF EAVTRLEAQH HVDMKSLLAW RSWSLATFRT HSLELHYQAF GPEDRLMAER QLLQSLEQGA SELKDIRLQL LRLPLDKEPA QKAQAEVEGL AEKVLALPEP LELTLGKLEQ KLKTISLVIR AHEEQLKEAQ ATKASLKKLR DALRDELRGA WRERVAQLLE RWQAVLAQTD RQLRYYRESA RRRQEQIQAM QLRQEQALLE ECQRFAKQYI VTYKAQLEPV SGSESVIQEY TTLTSQYIKF EERLAEQQRA AALEKQRQLA EREAKELQQR AAVDAQQQKR QSSEAEIQAK RLRIEEEIRV QRGGAEGELQ AQKRQAQEEA SQRKRQAEVE AAREKQRALQ EAERRLRQAE LETAQRSAEA EKTAQLERSL REEAERRAQQ AERELERWQL QAEEVAQQKS EEAEREARRR RELAEQELEK QRLAAEQELI QQRQLLEEEL TQKRQELEAE LLASKARAEE QRLEAEAGRF RALAEEAKRQ QRAEAERVLA RLKTEAEIAL |
| | | | | | KEKEAENERL RRRLEEQAAQ QLRKASDSEL LRQRRQVEEE AAAGKAELEL DTLRSKEQAE AEEERRRREA EEEAARQRKA KVEEARRLRE QLAQEAAQKR AVQQKEQELQ DQLRGEAEAA RVQAEREAAQ LKQSAEEQAQ KLRKEAEQEA LRQKQAADAE TLRQKAQVEQ ETDHQKNLLD TEAARQRSQV MEELSKLKAR RDKDNTQRFL AEEAARLSVA AEEDLAQQRA QAVQEATRLK ELAQEQARRL LAEETQGFQR EMSAEAERLK ARAEEDAQRF LHRTELATQE QRQQSDHDAE REKEKLQQEA QTVQQEQLLQ SEKDSLLQRE EQLFQDEVAK QQQQMEQERQ RRQHEAEEGV EQQRRQQEEL QLQLLEEQHR ASQVAATKTL AAEAEPEHSF RLQEAGILSA TTVDELARRE SIAGLLLKAT QRQLLSPGTA GFLLDPVRNR GVVGPELHHK YKDPYTGQQI IVREHGIRLL DPVHSHRVPV EEMNRVLADP NTHENLTYLQ TGLCLLPLTD TDSEARDVFE FQGKTVTIWE QRRDLLRQFR KIIITWEEQ LRSLVPAAEL YQQLQRGERS RRALRGANVI KLSIYNALKK | RRLAEDEAFQ HKADIEERLA ERQKGLVEDT ILALKASFEK ELGRIRSNAE LEAARQRQLA EERVQKSLAA ALEEVERLKA RAEQESARQL LQAEEKAHAF QTLQQEQSVL RRAAEEAEEA SRRQVEEAER ARAQAQAAAE ARRAQAEQAA MEKHKKFAEQ ELTTLRLQLE EELQRLKAEA EEELFSVRVQ IEAENRALIL QEEAEKMKQV AQEAARLRQL LAEKMLKEKM AEAELLQQQK QEDKEQMAQQ TLEAERQRQL LRVAEMSRAQ RKQAEEIGEK KVTLVQTLEI RLREAIAELE KLLQLKSEEM ETQALQQSFL RFIEQEKAKL AQQLREEQQR RLVASMEEAR RRKQEELQQL LAEENQRLRE AALAHSEEVT PNGRDALDGP DGLRRKVSAQ EELQRLAQGH DVRHYLQGRS NEKLSVYAAL LILLEAQAAS RLTVNEAVKE LLSAERAVTG SLFQAMQKGL EAQIATGGVI DVAYRRGYFD SDDTKGFFDP LLERCVEDPE KAAKGGELVY KATVSAPFGK IINSEYFTAE TGRITVEKII EQKGRLCFEG LESRVIDREL VRDVAEVDTV AGVWLEEAGQ DLLPSDMAVA |
| | | | | | LLEAQAGTGH TVDEAVRAGL SAEKAVTGYR FQALKKGLIP QLSTGGIVDP ACARGCLDEE DAKAYSDPST QRCRPDQLTG ARARQEELYS TPVEVPVGGF ISSEYFTAEQ GKVTVEKVIK TLRQERLSFS LLASGVLSRA TVKDLSELGS LAGIYLEDTK RGLLRATTAA FLVDPVRNQR VVGPELHEQL RDPYSGSTIS LRQHGIRLLE PVHSHRVPVD EMNRVLADPS THENLTYRQL GLRLLPLKGA VYTEEETRRA GGSHGGSTMS PEEQRAQLMA RMIIIIIEII LASYDYVRRR IISLETYNLL LEAESAWCYL LPGSRQTLSI AEVARLLLEA VKGERLTVDE LHDRLLSAER EQTISLFQAM LRLLDAQLAT HLPLEVAYQR LSEPSEVRSY YTQLLRRCRR LSDARKLTFR LVRSQVMDEA SIEEVTKNLQ GVFVDATKER IIRPGTAFEL IDPIKGLKLT GPEFKDKLLS PYSGKLISLF DHGIRLLEAQ ESHRLPVEVA NEILTDPSDD ENLTYLQLME CLLPLKEKKR RKRRVVIVDP AYRKGLIDHQ EWEEITISSS RRSGRQYDID SALDQYRAGT SGNAGGFRSR | IIDPATSARL VGPEFHEKLL DPYTGQSVSL REQGLRLLDA SKSHRVPLDV TSRALSAPRA GEPATYGELQ LSLLPLSEKA ELQARETFEK KGRTVTVWEL RQELLRQFRT ILITIVEEVE GLRAPVPASE QFEQLKDGKT VRTLLQGSGC EKVSIYEAMR LLLEAQAATG LYVHEAVKAG LSAEKAVTGY LFQAMQKGLV AQIATGGIID VAYQRGYFSE DDTKGFFDPN LERCVEDPET EKAEWETTQ FEETQIDIPG LWEVMQSDLI DFQAGRVTKE EKTEIIRQQG LTAEDLFEAR REGTRSLREA YGTGSVAGVY YQALKKGLLS QAATGFLLDP AVRKGLVGPE AVTGYRDPYT KKELIPTEEA GGIVDPRLGF GYLNKDTHDQ VDPSTDERLS DDGTGQLLLP GLRKQITMEE TALQLREGLT KFLEGTSCIA LSVYQAMKKG LEAQAATGYV VEEAVRMGIV AERAVTGYKD QAMKKGLILK IATGGIIDPE YKRGLFDEEM TKGFFDPNTE RCITDPQTGL ERKTSSKSSV ETGKEMSVYE TYLELSEQEC DGWKSMIID DAIAKNLIDR LSITEFADML SSSVGSSSSY |
| | | | | | PISPAVSRTQ TGPVAGILDT AMHRNLVDNI CTGGIIDPST NKGLVDKIMV CGFEDPRTKT GWLYYEAGQR LIEPDTPGRV VDARTAQKLR CPKTKLKISY EGTGLRLLEA PYSVSGSGST SRAGSRRGSF FSSSSYSSSG ASLGGPESAV | LASWSDPTEE ETLEKVSITE TGQRLLEAQA GERFPVTDAV DRINLAQKAF KMSAAQALKK FLEVQYLTGG PLDEALQRGT DVGAYSKYLT KDALDRSMVE AAQSTKGYYS AGSRTGSRTG DATGSGFSMT YGRRYASGSS A |
| 73 | PLEC | 7 | Q151497 | Entry version 224 (18 Sep. 2019) Sequence version 3 (14 Oct. 2008) | MKIVPDERDR NKHLIKAQRH GHNLISLLEV GRMRFHKLQN RQVKLVNIRN TLGLIWTIIL GQSEDMTAKE EGYQGLRCDN FNAIIHRHKP QTNLENLDQA TRLLDPEDVD TYVSSLYDAM RANELQLRWQ QWMRHHTAAF EIEILWSQFL EADKNRSKGI GQLKVPPGYH LHVAILEREK CLQRIVTKLQ NQADALLQSD QRAGEVERDL FNDVQTLKDG RVYRLHERLV KAGVAAPATQ RRPELEDSTL EENQHRVDGA AQLGSHRGLH ERARSDEGQL CLGRLDLQYA RSLESLHSFV NEKEEEEVGF AKKESYSALM KELQNAGDRL VESFQAALQT CIEAHLKENA EAEGQLQKLQ RSATVTRLED QLNEYKGHLS QLKPRHPAHP CDYKQVEVTV PAQPSHWKVL SVCFLVPPPN EAQHQALVTL LLAWQSLRRD | VQKKTFTKWV ISDLYEDLRD LSGDSLPREK VQIALDYLRH DDIADGNPKL HFQISDIQVS KLLLWSQRMV FTSSWRDGRL LLIDMNKVYR FSVAERDLGV VPQPDEKSII PRVPDVQDGV EYRELVLLLL EERRFPSSFE KFKEMELPAK YQSLEGAVQA PLDVEKEWGK QLRSEFERLE MEAGLCEEQL VRLLAAGKVP DKADSMIRLL RHPQGEQMYR AIRTEYNLRL VAQVTLQSVQ RYLQDLLAWV EWGVDLPSVE QSIEEFRAKI SPATRGAYRD KLLNSSKARL AAATKELMWL DWSDRNTNMT RELELKEKKI LREDHPARPT QWSWMLQLCC AYFQFFSDVR EALRRKYSCD LLQDAQDEKE CLAKRAKAVV MRGRLPLLAV HKGDECQLVG SSSGSEAAVP QEAQEAVTRL WHQLHVDMKS VQLIRSWSLA |
| | | | | | TFRTLKPEEQ YQAFLRDSQD MAEREYGSCS EQGAQEESRC RLQLEACETR KEPARECAQR VEGLGKGVAR LPEPSPAAPT KLEQVRSLSA LVIRGTQGAE KEAQAVPATL KKLRAQAEAQ LRGAQEVGER EVERWRERVA AQTDVRQREL RESADPLGAW IQAMPLADSQ ALLEEIERHG KQYINAIKDY LEPVASPAKK IQEYVDLRTH YIKFISETLR QQRAEERERL RQLAEAHAQA LQQRMQEEW QQKRSIQEEL IQAKARQAEA EIRVVRLQLE GELQALRARA QEEAERLRRQ AEVELASRVK RALQALEELR RQAEVERARQ SAEAELQSKR ERSLQEEHVA RAQQQAEAER RWQLKANEAL QQKSLAQAEA ARRRGKAEEQ ELEKQRQLAE QELIRLRAET EEELARLQRE LEAELAKVRA RAEEESRSTS AGRFRELAEE AKRQRQLAEE RVLAEKLAAI EIALKEKEAE EAFQRRRLEE ERLAQLRKAS VEDTLRQRRQ SFEKAAAGKA SNAEDTLRSK RQLAAEEERR SLAAEEEAAR RLKAKVEEAR ARQLQLAQEA AHAFAVQQKE QSVLDQLRGE AEEARVQAER | RQALHSLELH AGGFGPEDRL HHYQQLLQSL QRCISELKDI TVHRLRLPLD IAEQQKAQAE LSAEAEKVLA LRSELELTLG IYLEKLKTIS EVLRAHEEQL PELEATKASL QPTFDALRDE LQQRHGERDV QLLERWQAVL EQLGRQLRYY LQDARRRQEQ AVREQLRQEQ EKVEECQRFA ELQLVTYKAQ PKVQSGSESV YSELTTLTSQ RMEEEERLAE AEVEAALEKQ KAQAEREAKE RREEAAVDAQ QQLRQSSEAE AERSRLRIEE ATERQRGGAE EEAEAQKRQA VQDESQRKRQ AEAEAAREKQ LQAEEAERRL VQVALETAQR ASFAEKTAQL VAQLREEAER AREEAERELE RLRLQAEEVA EKQKEEAERE AVRQRELAEQ GTAQQRLAAE EQGEQQRQLL AAAATQKRQE EMEVLLASKA EKSKQRLEAE AARLRALAEE DAARQRAEAE GEATRLKTEA NERLRRLAED QAAQHKADIE DSELERQKGL VEEEILALKA ELELELGRIR EQAELEAARQ RREAEERVQK QRKAALEEVE RLRERAEQES AQKRLQAEEK QELQQTLQQE AEAARRAAEE EAAQSRRQVE |
| | | | | | EAERLKQSAE AAAEKLRKEA EQAALRQKQA FAEQTLRQKA LQLEETDHQK KAEATEAARQ VRVQMEELSK ALILRDKDNT MKQVAEEAAR LRQLAEEDLA KEKMQAVQEA QQQKELAQEQ MAQQLAEETQ QRQLEMSAEA SRAQARAEED IGEKLHRTEL TLEIQRQQSD AELEREKEKL SEEMQTVQQE QSFLSEKDSL KAKLEQLFQD EQQRQQQQME EEARRRQHEA LQQLEQQRRQ RLREQLQLLE EEVTASQVAA LDGPAAEAEP VSAQRLQEAG AQGHTTVDEL QGRSSIAGLL YAALQRQLLS QAASGFLLDP AVKEGVVGPE AVTGYKDPYT QKGLIVREHG GGVIDPVHSH GYFDEEMNRV FFDPNTHENL EDPETGLCLL ELVYTDSEAR PFGKFQGKTV FTAEQRRDLL EKIIKIIITV CFEGLRSLVP DRELYQQLQR VDTVRRALRG EAGQKLSIYN MAVALLEAQA SARLTVDEAV EKLLSAEKAV SVSLFQALKK LLDAQLSTGG PLDVACARGC APRADAKAYS GELQQRCRPD SEKAARARQE TFEKTPVEVP VWELISSEYF QFRTGKVTVE EEVETLRQER | EQAQARAQAQ EQEAARRAQA ADAEMEKHKK QVEQELTTLR NLLDEELQRL RSQVEEELFS LKARIEAENR QRFLQEEAEK LSVAAQEAAR QQRALAEKML TRLKAEAELL ARRLQEDKEQ GFQRTLEAER ERLKLRVAEM AQRFRKQAEE ATQEKVTLVQ HDAERLREAI QQEAKLLQLK QLLQETQALQ LQRERFIEQE EVAKAQQLRE QERQRLVASM EEGVRRKQEE QEELLAEENQ EQHRAALAHS TKTLPNGRDA EHSFDGLRRK ILSAEELQRL ARREDVRHYL LKATNEKLSV PGTALILLEA VRNRRLTVNE LHHKLLSAER GQQISLFQAM IRLLEAQIAT RVPVDVAYRR LADPSDDTKG TYLQLLERCV PLTDKAAKGG DVFEKATVSA TIWEIINSEY RQFRTGRITV VEEQEQKGRL AAELLESRVI GERSVRDVAE ANVIAGVWLE ALKKDLLPSD GTGHIIDPAT RAGLVGPEFH TGYRDPYTGQ GLIPREQGLR IVDPSKSHRV LDEETSRALS DPSTGEPATY QLTGLSLLPL ELYSELQARE VGGFKGRTVT TAEQRQELLR KVIKILITIV LSFSGLRAPV |
| | | | | | PASELLASGV DGKTTVKDLS GSGCLAGIYL EAMRRGLLRA AATGFLVDPV VKAGVVGPEL VTGYRDPYSG KGLVLRQHGI GIIDPVHSHR YFSEEMNRVL FDPNTHENLT DPETGLRLLP ETTQVYTEEE DIPGGGSHGG SDLIPEEQRA VTKERMIIII RQQGLASYDY FEARIISLET LREALEAESA AGVYLPGSRQ GLLSAEVARL LLDPVKGERL VGPELHDRLL DPYTEQTISL TEEALRLLDA RLGFHLPLEV THDQLSEPSE ERLSYTQLLR LLLPLSDARK TMEELVRSQV EGLTSIEEVT SCIAGVFVDA MKKGIIRPGT TGYVIDPIKG MGIVGPEFKD GYKDPYSGKL LILKDHGIRL IDPEESHRLP DEEMNEILTD PNTEENLTYL QTGLCLLPLK KSSVRKRRVV SVYEAYRKGL EQECEWEEIT MIIDRRSGRQ LIDRSALDQY ADMLSGNAGG SSSYPISPAV PTEETGPVAG SITEAMHRNL EAQACTGGII TDAVNKGLVD QKAFCGFEDP ALKKGWLYYE LTGGLIEPDT QRGTVDARTA KYLTCPKTKL SMVEEGTGLR GYYSPYSVSG SRTGSRAGSR | LSRAQFEQLK ELGSVRTLLQ EDTKEKVSIY TTAALLLEAQ RNQRLYVHEA HEQLLSAEKA STISLFQAMQ RLLEAQIATG VPVDVAYQRG ADPSDDTKGF YRQLLERCVE LKGAEKAEW TRRAFEETQI STMSLWEVMQ QLMADFQAGR IEIIEKTEII VRRRLTAEDL YNLLREGTRS WCYLYGTGSV TLSIYQALKK LLEAQAATGF TVDEAVRKGL SAERAVTGYR FQAMKKELIP QLATGGIVDP AYQRGYLNKD VRSYVDPSTD RCRRDDGTGQ LTFRGLRKQI MDEATALQLR KNLQKFLEGT TKERLSVYQA AFELLEAQAA LKLTVEEAVR KLLSAERAVT ISLFQAMKKG LEAQIATGGI VEVAYKRGLF PSDDTKGFFD QLMERCITDP EKKRERKTSS IVDPETGKEM IDHQTYLELS ISSSDGVVKS YDIDDAIAKN RAGTLSITEF FRSRSSSVGS SRTQLASWSD ILDTETLEKV VDNITGQRLL DPSTGERFPV KIMVDRINLA RTKTKMSAAQ AGQRFLEVQY PGRVPLDEAL QKLRDVGAYS KISYKDALDR LLEAAAQSTK SGSTAGSRTG RGSFDATGSG |
| | | | | | FSMTFSSSSY SGSSASLGGP | SSSGYGRRYA ESAVA |
| 74 | PLEC | 8 | Q151498 | Entry version 224 (18 Sep. 2019) Sequence version 3 (14 Oct. 2008) | MDPSRAIQNE VQKKTFTKWV ISDLYEDLRD LSGDSLPREK VQIALDYLRH DDIADGNPKL HFQISDIQVS KLLLWSQRMV FTSSWRDGRL LLIDMNKVYR FSVAERDLGV VPQPDEKSII PRVPDVQDGV EYRELVLLLL EERRFPSSFE KFKEMELPAK YQSLEGAVQA PLDVEKEWGK QLRSEFERLE MEAGLCEEQL VRLLAAGKVP DKADSMIRLL RHPQGEQMYR AIRTEYNLRL VAQVTLQSVQ RYLQDLLAWV EWGVDLPSVE QSIEEFRAKI SPATRGAYRD KLLNSSKARL AAATKELMWL DWSDRNTNMT RELELKEKKI LREDHPARPT QWSWMLQLCC AYFQFFSDVR EALRRKYSCD LLQDAQDEKE CLAKRAKAVV MRGRLPLLAV HKGDECQLVG SSSGSEAAVP QEAQEAVTRL WHQLHVDMKS VQLIRSWSLA RQALHSLELH AGGFGPEDRL HHYQQLLQSL QRCISELKDI TVHRLRLPLD IAEQQKAQAE LSAEAEKVLA LRSELELTLG IYLEKLKTIS EVLRAHEEQL PELEATKASL QPTFDALRDE | ISSLKDERDR NKHLIKAQRH GHNLISLLEV GRMRFHKLQN RQVKLVNIRN TLGLIWTIIL GQSEDMTAKE EGYQGLRCDN FNAIIHRHKP QTNLENLDQA TRLLDPEDVD TYVSSLYDAM RANELQLRWQ QWMRHHTAAF EIEILWSQFL EADKNRSKGI GQLKVPPGYH LHVAILEREK CLQRIVTKLQ NQADALLQSD QRAGEVERDL FNDVQTLKDG RVYRLHERLV KAGVAAPATQ RRPELEDSTL EENQHRVDGA AQLGSHRGLH ERARSDEGQL CLGRLDLQYA RSLESLHSFV NEKEEEEVGF AKKESYSALM KELQNAGDRL VESFQAALQT CIEAHLKENA EAEGQLQKLQ RSATVTRLED QLNEYKGHLS QLKPRHPAHP CDYKQVEVTV PAQPSHWKVL SVCFLVPPPN EAQHQALVTL LLAWQSLRRD TFRTLKPEEQ YQAFLRDSQD MAEREYGSCS EQGAQEESRC RLQLEACETR KEPARECAQR VEGLGKGVAR LPEPSPAAPT KLEQVRSLSA LVIRGTQGAE KEAQAVPATL KKLRAQAEAQ LRGAQEVGER |
| | | | | | LQQRHGERDV QLLERWQAVL EQLGRQLRYY LQDARRRQEQ AVREQLRQEQ EKVEECQRFA ELQLVTYKAQ PKVQSGSESV YSELTTLTSQ RMEEEERLAE AEVEAALEKQ KAQAEREAKE RREEAAVDAQ QQLRQSSEAE AERSRLRIEE ATERQRGGAE EEAEAQKRQA VQDESQRKRQ AEAEAAREKQ LQAEEAERRL VQVALETAQR ASFAEKTAQL VAQLREEAER AREEAERELE RLRLQAEEVA EKQKEEAERE AVRQRELAEQ GTAQQRLAAE EQGEQQRQLL AAAATQKRQE EMEVLLASKA EKSKQRLEAE AARLRALAEE DAARQRAEAE GEATRLKTEA NERLRRLAED QAAQHKADIE DSELERQKGL VEEEILALKA ELELELGRIR EQAELEAARQ RREAEERVQK QRKAALEEVE RLRERAEQES AQKRLQAEEK QELQQTLQQE AEAARRAAEE EAAQSRRQVE EQAQARAQAQ EQEAARRAQA ADAEMEKHKK QVEQELTTLR NLLDEELQRL RSQVEEELFS LKARIEAENR QRFLQEEAEK LSVAAQEAAR QQRALAEKML TRLKAEAELL ARRLQEDKEQ | EVERWRERVA AQTDVRQREL RESADPLGAW IQAMPLADSQ ALLEEIERHG KQYINAIKDY LEPVASPAKK IQEYVDLRTH YIKFISETLR QQRAEERERL RQLAEAHAQA LQQRMQEEW QQKRSIQEEL IQAKARQAEA EIRVVRLQLE GELQALRARA QEEAERLRRQ AEVELASRVK RALQALEELR RQAEVERARQ SAEAELQSKR ERSLQEEHVA RAQQQAEAER RWQLKANEAL QQKSLAQAEA ARRRGKAEEQ ELEKQRQLAE QELIRLRAET EEELARLQRE LEAELAKVRA RAEEESRSTS AGRFRELAEE AKRQRQLAEE RVLAEKLAAI EIALKEKEAE EAFQRRRLEE ERLAQLRKAS VEDTLRQRRQ SFEKAAAGKA SNAEDTLRSK RQLAAEEERR SLAAEEEAAR RLKAKVEEAR ARQLQLAQEA AHAFAVQQKE QSVLDQLRGE AEEARVQAER EAERLKQSAE AAAEKLRKEA EQAALRQKQA FAEQTLRQKA LQLEETDHQK KAEATEAARQ VRVQMEELSK ALILRDKDNT MKQVAEEAAR LRQLAEEDLA KEKMQAVQEA QQQKELAQEQ MAQQLAEETQ |
| | | | | | GFQRTLEAER ERLKLRVAEM AQRFRKQAEE ATQEKVTLVQ HDAERLREAI QQEAKLLQLK QLLQETQALQ LQRERFIEQE EVAKAQQLRE QERQRLVASM EEGVRRKQEE QEELLAEENQ EQHRAALAHS TKTLPNGRDA EHSFDGLRRK ILSAEELQRL ARREDVRHYL LKATNEKLSV PGTALILLEA VRNRRLTVNE LHHKLLSAER GQQISLFQAM IRLLEAQIAT RVPVDVAYRR LADPSDDTKG TYLQLLERCV PLTDKAAKGG DVFEKATVSA TIWEIINSEY RQFRTGRITV VEEQEQKGRL AAELLESRVI GERSVRDVAE ANVIAGVWLE ALKKDLLPSD GTGHIIDPAT RAGLVGPEFH TGYRDPYTGQ GLIPREQGLR IVDPSKSHRV LDEETSRALS DPSTGEPATY QLTGLSLLPL ELYSELQARE VGGFKGRTVT TAEQRQELLR KVIKILITIV LSFSGLRAPV LSRAQFEQLK ELGSVRTLLQ EDTKEKVSIY TTAALLLEAQ RNQRLYVHEA HEQLLSAEKA STISLFQAMQ RLLEAQIATG VPVDVAYQRG ADPSDDTKGF YRQLLERCVE LKGAEKAEW | QRQLEMSAEA SRAQARAEED IGEKLHRTEL TLEIQRQQSD AELEREKEKL SEEMQTVQQE QSFLSEKDSL KAKLEQLFQD EQQRQQQQME EEARRRQHEA LQQLEQQRRQ RLREQLQLLE EEVTASQVAA LDGPAAEAEP VSAQRLQEAG AQGHTTVDEL QGRSSIAGLL YAALQRQLLS QAASGFLLDP AVKEGVVGPE AVTGYKDPYT QKGLIVREHG GGVIDPVHSH GYFDEEMNRV FFDPNTHENL EDPETGLCLL ELVYTDSEAR PFGKFQGKTV FTAEQRRDLL EKIIKIIITV CFEGLRSLVP DRELYQQLQR VDTVRRALRG EAGQKLSIYN MAVALLEAQA SARLTVDEAV EKLLSAEKAV SVSLFQALKK LLDAQLSTGG PLDVACARGC APRADAKAYS GELQQRCRPD SEKAARARQE TFEKTPVEVP VWELISSEYF QFRTGKVTVE EEVETLRQER PASELLASGV DGKTTVKDLS GSGCLAGIYL EAMRRGLLRA AATGFLVDPV VKAGVVGPEL VTGYRDPYSG KGLVLRQHGI GIIDPVHSHR YFSEEMNRVL FDPNTHENLT DPETGLRLLP ETTQVYTEEE |
| | | | | | TRRAFEETQI STMSLWEVMQ QLMADFQAGR IEIIEKTEII VRRRLTAEDL YNLLREGTRS WCYLYGTGSV TLSIYQALKK LLEAQAATGF TVDEAVRKGL SAERAVTGYR FQAMKKELIP QLATGGIVDP AYQRGYLNKD VRSYVDPSTD RCRRDDGTGQ LTFRGLRKQI MDEATALQLR KNLQKFLEGT TKERLSVYQA AFELLEAQAA LKLTVEEAVR KLLSAERAVT ISLFQAMKKG LEAQIATGGI VEVAYKRGLF PSDDTKGFFD QLMERCITDP EKKRERKTSS IVDPETGKEM IDHQTYLELS ISSSDGVVKS YDIDDAIAKN RAGTLSITEF FRSRSSSVGS SRTQLASWSD ILDTETLEKV VDNITGQRLL DPSTGERFPV KIMVDRINLA RTKTKMSAAQ AGQRFLEVQY PGRVPLDEAL QKLRDVGAYS KISYKDALDR LLEAAAQSTK SGSTAGSRTG FSMTFSSSSY SSSGYGRRYA ESAVA | DIPGGGSHGG SDLIPEEQRA VTKERMIIII RQQGLASYDY FEARIISLET LREALEAESA AGVYLPGSRQ GLLSAEVARL LLDPVKGERL VGPELHDRLL DPYTEQTISL TEEALRLLDA RLGFHLPLEV THDQLSEPSE ERLSYTQLLR LLLPLSDARK TMEELVRSQV EGLTSIEEVT SCIAGVFVDA MKKGIIRPGT TGYVIDPIKG MGIVGPEFKD GYKDPYSGKL LILKDHGIRL IDPEESHRLP DEEMNEILTD PNTEENLTYL QTGLCLLPLK KSSVRKRRVV SVYEAYRKGL EQECEWEEIT MIIDRRSGRQ LIDRSALDQY ADMLSGNAGG SSSYPISPAV PTEETGPVAG SITEAMHRNL EAQACTGGII TDAVNKGLVD QKAFCGFEDP ALKKGWLYYE LTGGLIEPDT QRGTVDARTA KYLTCPKTKL SMVEEGTGLR GYYSPYSVSG SRTGSRAGSR RGSFDATGSG SGSSASLGGP |
| 75 | PLEC | 9 | Q151499 | Entry version 224 (18 Sep. 2019) Sequence version 3 (14 Oct. 2008) | MAGPLPDEQD KYKDERDRVQ HLIKAQRHIS NLISLLEVLS MRFHKLQNVQ VKLVNIRNDD GLIWTIILHF SEDMTAKEKL YQGLRCDNFT AIIHRHKPLL | FIQAYEEVRE KKTFTKWVNK DLYEDLRDGH GDSLPREKGR IALDYLRHRQ IADGNPKLTL QISDIQVSGQ LLWSQRMVEG SSWRDGRLFN IDMNKVYRQT |
| | | | | | NLENLDQAFS LLDPEDVDVP VSSLYDAMPR NELQLRWQEY MRHHTAAFEE EILWSQFLKF DKNRSKGIYQ LKVPPGYHPL VAILEREKQL QRIVTKLQME ADALLQSDVR AGEVERDLDK DVQTLKDGRH YRLHERLVAI GVAAPATQVA PELEDSTLRY NQHRVDGAEW LGSHRGLHQS ARSDEGQLSP GRLDLQYAKL LESLHSFVAA KEEEEVGFDW KESYSALMRE LQNAGDRLLR SFQAALQTQW EAHLKENAAY EGQLQKLQEA ATVTRLEDLL NEYKGHLSGL KPRHPAHPMR YKQVEVTVHK QPSHWKVLSS CFLVPPPNQE QHQALVTLWH AWQSLRRDVQ RTLKPEEQRQ AFLRDSQDAG EREYGSCSHH GAQEESRCQR QLEACETRTV PARECAQRIA GLGKGVARLS EPSPAAPTLR EQVRSLSAIY IRGTQGAEEV AQAVPATLPE LRAQAEAQQP GAQEVGERLQ ERWRERVAQL TDVRQRELEQ SADPLGAWLQ AMPLADSQAV LEEIERHGEK YINAIKDYEL PVASPAKKPK EYVDLRTHYS KFISETLRRM RAEERERLAE LAEAHAQAKA QRMQEEWRR | VAERDLGVTR QPDEKSIITY VPDVQDGVRA RELVLLLLQW RRFPSSFEEI KEMELPAKEA SLEGAVQAGQ DVEKEWGKLH RSEFERLECL AGLCEEQLNQ LLAAGKVPQR ADSMIRLLFN PQGEQMYRRV RTEYNLRLKA QVTLQSVQRR LQDLLAWVEE GVDLPSVEAQ IEEFRAKIER ATRGAYRDCL LNSSKARLRS ATKELMWLNE SDRNTNMTAK LELKEKKIKE EDHPARPTVE SWMLQLCCCI FQFFSDVREA LRRKYSCDRS QDAQDEKEQL AKRAKAVVQL GRLPLLAVCD GDECQLVGPA SGSEAAVPSV AQEAVTRLEA QLHVDMKSLL LIRSWSLATF ALHSLELHYQ GFGPEDRLMA YQQLLQSLEQ CISELKDIRL HRLRLPLDKE EQQKAQAEVE AEAEKVLALP SELELTLGKL LEKLKTISLV LRAHEEQLKE LEATKASLKK TFDALRDELR QRHGERDVEV LERWQAVLAQ LGRQLRYYRE DARRRQEQIQ REQLRQEQAL VEECQRFAKQ QLVTYKAQLE VQSGSESVIQ ELTTLTSQYI EEEERLAEQQ VEAALEKQRQ QAEREAKELQ EEAAVDAQQQ |
| | | | | | KRSIQEELQQ AKARQAEAAE RVVRLQLEAT LQALRARAEE EAERLRRQVQ VELASRVKAE LQALEELRLQ AEVERARQVQ EAELQSKRAS SLQEEHVAVA QQQAEAERAR QLKANEALRL KSLAQAEAEK RRGKAEEQAV EKQRQLAEGT LIRLRAETEQ ELARLQREAA AELAKVRAEM EEESRSTSEK RFRELAEEAA RQRQLAEEDA LAEKLAAIGE ALKEKEAENE FQRRRLEEQA LAQLRKASDS DTLRQRRQVE EKAAAGKAEL AEDTLRSKEQ LAAEEERRRR AAEEEAARQR KAKVEEARRL QLQLAQEAAQ AFAVQQKEQE VLDQLRGEAE EARVQAEREA ERLKQSAEEQ AEKLRKEAEQ AALRQKQAAD EQTLRQKAQV LEETDHQKNL EATEAARQRS VQMEELSKLK ILRDKDNTQR QVAEEAARLS QLAEEDLAQQ RALAEKMLKE QKELAQEQAR QQLAEETQGF QRTLEAERQR AQARAEEDAQ EKLHRTELAT EIQRQQSDHD LEREKEKLQQ EMQTVQQEQL FLSEKDSLLQ KLEQLFQDEV QRQQQQMEQE ARRRQHEAEE QLEQQRRQQE REQLQLLEEQ | LRQSSEAEIQ RSRLRIEEEI ERQRGGAEGE AEAQKRQAQE DESQRKRQAE AEAAREKQRA AEEAERRLRQ VALETAQRSA FAEKTAQLER QLREEAERRA EEAERELERW RLQAEEVAQQ QKEEAEREAR RQRELAEQEL AQQRLAAEQE GEQQRQLLEE AATQKRQELE EVLLASKARA SKQRLEAEAG RLRALAEEAK ARQRAEAERV ATRLKTEAEI RLRRLAEDEA AQHKADIEER ELERQKGLVE EEILALKASF ELELGRIRSN AELEAARQRQ EAEERVQKSL KAALEEVERL RERAEQESAR KRLQAEEKAH LQQTLQQEQS AARRAAEEAE AQSRRQVEEA AQARAQAQAA EAARRAQAEQ AEMEKHKKFA EQELTTLRLQ LDEELQRLKA QVEEELFSVR ARIEAENRAL FLQEEAEKMK VAAQEAARLR KMQAVQEATR LKAEAELLQQ RLQEDKEQMA QLEMSAEAER LKLRVAEMSR RFRKQAEEIG QEKVTLVQTL AERLREAIAE EAKLLQLKSE LQETQALQQS RERFIEQEKA AKAQQLREEQ RQRLVASMEE GVRRKQEELQ ELLAEENQRL HRAALAHSEE |
| | | | | | VTASQVAATK GPAAEAEPEH AQRLQEAGIL GHTTVDELAR RSSIAGLLLK ALQRQLLSPG ASGFLLDPVR KEGVVGPELH TGYKDPYTGQ GLIVREHGIR VIDPVHSHRV FDEEMNRVLA DPNTHENLTY PETGLCLLPL VYTDSEARDV GKFQGKTVTI AEQRRDLLRQ IIKIIITVVE EGLRSLVPAA ELYQQLQRGE TVRRALRGAN GQKLSIYNAL VALLEAQAGT RLTVDEAVRA LLSAEKAVTG SLFQALKKGL DAQLSTGGIV DVACARGCLD RADAKAYSDP LQQRCRPDQL KAARARQEEL EKTPVEVPVG ELISSEYFTA RTGKVTVEKV VETLRQERLS SELLASGVLS KTTVKDLSEL GCLAGIYLED MRRGLLRATT TGFLVDPVRN AGVVGPELHE GYRDPYSGST LVLRQHGIRL IDPVHSHRVP SEEMNRVLAD PNTHENLTYR ETGLRLLPLK TQVYTEEETR PGGGSHGGST LIPEEQRAQL KERMIIIIIE QGLASYDYVR ARIISLETYN EALEAESAWC VYLPGSRQTL LSAEVARLLL DPVKGERLTV PELHDRLLSA YTEQTISLFQ EALRLLDAQL | TLPNGRDALD SFDGLRRKVS SAEELQRLAQ REDVRHYLQG ATNEKLSVYA TALILLEAQA NRRLTVNEAV HKLLSAERAV QISLFQAMQK LLEAQIATGG PVDVAYRRGY DPSDDTKGFF LQLLERCVED TDKAAKGGEL FEKATVSAPF WEIINSEYFT FRTGRITVEK EQEQKGRLCF ELLESRVIDR RSVRDVAEVD VIAGVWLEEA KKDLLPSDMA GHIIDPATSA GLVGPEFHEK YRDPYTGQSV IPREQGLRLL DPSKSHRVPL EETSRALSAP STGEPATYGE TGLSLLPLSE YSELQARETF GFKGRTVTVW EQRQELLRQF IKILITIVEE FSGLRAPVPA RAQFEQLKDG GSVRTLLQGS TKEKVSIYEA AALLLEAQAA QRLYVHEAVK QLLSAEKAVT ISLFQAMQKG LEAQIATGGI VDVAYQRGYF PSDDTKGFFD QLLERCVEDP GAEKAEVVET RAFEETQIDI MSLWEVMQSD MADFQAGRVT IIEKTEIIRQ RRLTAEDLFE LLREGTRSLR YLYGTGSVAG SIYQALKKGL EAQAATGFLL DEAVRKGLVG ERAVTGYRDP AMKKELIPTE ATGGIVDPRL |
| | | | | | GFHLPLEVAY DQLSEPSEVR LSYTQLLRRC LPLSDARKLT EELVRSQVMD LTSIEEVTKN IAGVFVDATK KGIIRPGTAF YVIDPIKGLK IVGPEFKDKL KDPYSGKLIS LKDHGIRLLE PEESHRLPVE EMNEILTDPS TEENLTYLQL GLCLLPLKEK SVRKRRVVIV YEAYRKGLID ECEWEEITIS IDRRSGRQYD DRSALDQYRA MLSGNAGGFR SYPISPAVSR EETGPVAGIL TEAMHRNLVD QACTGGIIDP AVNKGLVDKI AFCGFEDPRT KKGWLYYEAG GGLIEPDTPG GTVDARTAQK LTCPKTKLKI VEEGTGLRLL YSPYSVSGSG TGSRAGSRRG MTFSSSSYSS SSASLGGPES | QRGYLNKDTH SYVDPSTDER RRDDGTGQLL FRGLRKQITM EATALQLREG LQKFLEGTSC ERLSVYQAMK ELLEAQAATG LTVEEAVRMG LSAERAVTGY LFQAMKKGLI AQIATGGIID VAYKRGLFDE DDTKGFFDPN MERCITDPQT KRERKTSSKS DPETGKEMSV HQTYLELSEQ SSDGVVKSMI IDDAIAKNLI GTLSITEFAD SRSSSVGSSS TQLASWSDPT DTETLEKVSI NITGQRLLEA STGERFPVTD MVDRINLAQK KTKMSAAQAL QRFLEVQYLT RVPLDEALQR LRDVGAYSKY SYKDALDRSM EAAAQSTKGY STAGSRTGSR SFDATGSGFS SGYGRRYASG AVA |
| 76 | ACSLI | 1 | P33121 | Entry version 186 (18 Sep. 2019) Sequence version 1 (01 Oct. 1993) | MQAHELFRYF YVRTLPTNTL LKPPCDLSMQ SVEVAGSGGA PLVYFYDDVT QVSNNGPCLG LSYKQVAELS GFKTAPDQFI VIIEQGCFAY LGNEAITYIV DKPEKAKLLL LKIIVVMDAY CGVEVTSMKA KPKPPAPEDL GNPKGAMVTH VKATENTVNP PLAHMFERVV IGFFQGDIRL TVFPVVPRLL ANTTLKRWLL LRSGIIRNNS QSSLGGRVRL TVLTFLRAAL | RMPELVDFRQ MGFGAFAALT TFWYATRPKP RRSALLDSDE TLYEGFQRGI SRKPDQPYEW ECIGSALIQK GIFAQNRPEW SMVIVPLYDT NKAELSLVFV EGVENKLIPG GSELVERGQR MEDLGRANRR AVICFTSGTT RNIVSDCSAF CPDDTLISFL ECVMLCHGAK LMDDLKVLQP NRMFDRIFGQ DFASKRKEAE LWDRLIFHKV MVTGAAPVSA GCQFYEGYGQ |
| | | | | | TECTAGCCLT GAPMPCNLIK AAEGEGEVCV KDPAKTAEAL IGKWLPNGTL KLAQGEYIAP EPVAQVFVHG VVPDVETLCS FEELCRNKDV LGKDSGLKPF ELFSIDNGLL LRNYFRSQID | MPGDWTAGHV LVDVEEMNYM KGPNVFQGYL DKDGWLHTGD KIIDRKKHIF EKIENIYMRS ESLQAFLIAI WAQKRGFEGS KKAILEDMVR EQVKGITLHP TPTMKAKRPE DLYSTIK |
| 77 | ACSLI | 2 | P331212 | Entry version186 (18 Sep. 2019) Sequence version 1 (01 Oct. 1993) | MQAHELFRYF YVRTLPTNTL TFWYATRPKP SVEVAGSGGA PLVYFYDDVT QVSNNGPCLG LSYKQVAELS GFKTAPDQFI VIIEQGCFAY LGNEAITYIV DKPEKAKLLL LKIIVVMDAY CGVEVTSMKA KPKPPAPEDL GNPKGAMVTH VKATENTVNP PLAHMFERVV IGFFQGDIRL TVFPVVPRLL ANTTLKRWLL LRSGIIRNNS QSSLGGRVRL TVLTFLRAAL TECTAGCCLT GAPMPCNLIK AAEGEGEGYL DKDGWLHTGD KIIDRKKHIF EKIENIYMRS ESLQAFLIAI WAQKRGFEGS KKAILEDMVR EQVKGITLHP TPTMKAKRPE DLYSTIKV | RMPELVDFRQ MGFGAFAALT LKPPCDLSMQ RRSALLDSDE TLYEGFQRGI SRKPDQPYEW ECIGSALIQK GIFAQNRPEW SMVIVPLYDT NKAELSLVFV EGVENKLIPG GSELVERGQR MEDLGRANRR AVICFTSGTT RNIVSDCSAF CPDDTLISFL ECVMLCHGAK LMDDLKVLQP NRMFDRIFGQ DFASKRKEAE LWDRLIFHKV MVTGAAPVSA GCQFYEGYGQ MPGDWTAGHV LVDVEEMNYM KDPAKTAEAL IGKWLPNGTL KLAQGEYIAP EPVAQVFVHG VVPDVETLCS FEELCRNKDV LGKDSGLKPF ELFSIDNGLL LRNYFRSQID |
| 78 | ACSLI | 3 | P331213 | Entry version 186 (18 Sep. 2019) Sequence version 1 (01 Oct. 1993) | MQAHELFRYF YVRTLPTNTL TFWYATRPKP SVEVAGSGGA PLVYFYDDVT QVSNNGPCLG LSYKQVAELS GFKTAPDQFI VIIEQGCFAY LGNEAITYIV DKPEKAKLLL LKIIVVMDAY CGVEVTSMKA | RMPELVDFRQ MGFGAFAALT LKPPCDLSMQ RRSALLDSDE TLYEGFQRGI SRKPDQPYEW ECIGSALIQK GIFAQNRPEW SMVIVPLYDT NKAELSLVFV EGVENKLIPG GSELVERGQR MEDLGRANRR |
| | | | | | KPKPPAPEDL GNPKGAMVTH VKATEKALPL PLAHIYEQLL IGFFQGDIRL TVFPVVPRLL ANTTLKRWLL LRSGIIRNNS QSSLGGRVRL TVLTFLRAAL TECTAGCCLT GAPMPCNLIK AAEGEGEVCV KDPAKTAEAL IGKWLPNGTL KLAQGEYIAP EPVAQVFVHG VVPDVETLCS FEELCRNKDV LGKDSGLKPF ELFSIDNGLL LRNYFRSQID | AVICFTSGTT RNIVSDCSAF SASDTHISYL KCVMLCHGAK LMDDLKVLQP NRMFDRIFGQ DFASKRKEAE LWDRLIFHKV MVTGAAPVSA GCQFYEGYGQ MPGDWTAGHV LVDVEEMNYM KGPNVFQGYL DKDGWLHTGD KIIDRKKHIF EKIENIYMRS ESLQAFLIAI WAQKRGFEGS KKAILEDMVR EQVKGITLHP TPTMKAKRPE DLYSTIKV |
| 79 | RAC1 | 1 | P63000 | Entry version 192 (18 Sep. 2019) Sequence version 1 (31 Aug. 2004) | MQAIKCVVVG ISYTTNAFPG SANVMVDGKP QEDYDRLRPL CFSLVSPASF VRHHCPNTPI DDKDTIEKLK QGLAMAKEIG TQRGLKTVFD PVKKRKRKCL | DGAVGKTCLL EYIPTVFDNY VNLGLWDTAG SYPQTDVFLI ENVRAKWYPE ILVGTKLDLR EKKLTPITYP AVKYLECSAL EAIRAVLCPP LL |
| 80 | RAC1 | 2 | P630002 | Entry version 192 (18 Sep. 2019) Sequence version 1 (31 Aug. 2004) | MQAIKCVVVG ISYTTNAFPG SANVMVDGKP QEDYDRLRPL GKDITSRGKD FSLVSPASFE RHHCPNTPII DKDTIEKLKE GLAMAKEIGA QRGLKTVFDE VKKRKRKCLL | DGAVGKTCLL EYIPTVFDNY VNLGLWDTAG SYPQTVGETY KPIADVFLIC NVRAKWYPEV LVGTKLDLRD KKLTPITYPQ VKYLECSALT AIRAVLCPPP L |
| 81 | PSMB2 | 1 | P49721 | Entry version 201 (18 Sep. 2019) Sequence version 1 (01 Oct. 1996) | MEYLIGIQGP AASNIVQMKD KILLLCVGEA QKNVQLYKMR ANFTRRNLAD NLLLAGYDEH LAALAKAPFA SILDRYYTPT RKCLEELQKR RIIDKNGIHD S | DYVLVASDRV DHDKMFKMSE GDTVQFAEYI NGYELSPTAA CLRSRTPYHV EGPALYYMDY AHGYGAFLTL ISRERAVELL FILNLPTFSV LDNISFPKQG |
| 82 | GM2A | 1 | P17900 | Entry version 190 (18 Sep. 2019) | MQSLMQAPLL AQAHLKKPSQ EGKDPAVIRS | IALGLLLAAP LSSFSWDNCD LTLEPDPIIV |
| | | | | Sequence version 4 (13 Nov. 2007 | PGNVTLSVMG KVDLVLEKEV DYIGSCTFEH TGEPCPEPLR KEGTYSLPKS SWLTTGNYRI LGCIKIAASL | STSVPLSSPL AGLWIKIPCT FCDVLDMLIP TYGLPCHCPF EFVVPDLELP ESVLSSSGKR KGI |

### VARIANT GENE SEQUENCES

[0461]

| SEQ ID NO. | GENE | Accession No. | Ensembl Release No. |
|---|---|---|---|
| 83 | CAP37 | ENSG00000278624 | 98 |
| 84 | TAPBP | ENSG00000112493 | 98 |
| 85 | TAPBP | ENSG00000206281 | 98 |
| 86 | TAPBP | ENSG00000112493 | 98 |
| 87 | TAPBP | ENSG00000236490 | 98 |

### EXAMPLES

### Materials and Methods

### Isolation of Stem Cell-Derived Neutrophils

[0462] Stem cell-derived neutrophils (SCDN) were synthesised according to standard techniques and cultured ex vivo for 25 days following Ficoll-separation to obtain PBMCs and CD34+ isolates from ten one-off donor buffy leukocyte cones. Aliquots of the SCDN (50 × 10⁶ /ml) were frozen at -80° C. in cryopreservative (10% FBS in DMSO).

### Evaluation of Cancer Killing Activity (CKA) Using the xCelligence Assay

[0463] SCDN were thawed and decanted into complete Dulbecco’s modified Eagle’s medium (DMEM) before incubation for 72 hours with pancreatic cancer (PANC-1) cells and ‘healthy’ breast epithelial cells (MCF-12F) (commercially available from the American Type Culture Collection - United Kingdom (U.K.), Guernsey, Ireland, Jersey and Liechtenstein, LGC Standards, Queens Road, Teddington, Middlesex TW11 0LY, UK). CKA was recorded regularly throughout the 72 hour culture period by xCelligence Assay.

[0464] The ACEA Biosciences xCELLigence RTCA DP Analyzer system® was used and the manufacturer’s instructions were followed. The xCELLigence System is a real-time cell analyser, allowing for label-free and dynamic monitoring of cellular phenotypic changes continuously by measuring electrical impedance. The system measures impedance using interdigitated gold microelectrodes integrated into the bottom of each well of the tissue culture E-Plates. Impedance measurements are displayed as Cell Index (CI) values, providing quantitative information about the biological status of the cells, including viability. Impedance-based monitoring of cell viability correlates with cell number and MTT-based readout. The kinetic aspect of impedance-based cell viability measurements provides the necessary temporal information when neutrophils are used to induce cytotoxic effects. In particular, the xCELLigence System can also pinpoint the optimal time points when the neutrophils achieve their maximal effect (where such data is desired), as indicated by the lowest CI values, in cytotoxicity and cell death assays. 6,000 cancer cells (PANC-1) or healthy, non-cancerous cells (MCF-12F) are placed in the bottom of a 16 well plate (the system can read up to 3 plates simultaneously). For the first few hours after cells have been added to a well there is a rapid increase in impedance. This is caused by cells falling out of suspension, depositing onto the electrodes, and forming focal adhesions. If the initial number of cells added is low and there is empty space on the well bottom, cells will proliferate, causing a gradual yet steady increase in Cl. When cells reach confluence the CI value plateaus, reflecting the fact that the electrode surface area that is accessible to bulk media is no longer changing. At this point, which is called the ‘normalization point’, the neutrophils (60,000 cells) are added (giving a 10:1 effector:target ratio) and incubated at 37° C. The percentage of cytolysis is readily calculated using a simple formula: Percentage of cytolysis = ((Cell indexₙₒ_{effector} - Cell Index_{effector})/Cell Indexₙₒ_{effector}) × 100.

[0465] SCDNs that demonstrated >80% CKA (against PANC-1) by 48 hours after addition, and <10% off-target killing (i.e. killed <10% of ‘healthy’ breast epithelial cells (MCF-12F) by 48 hours after addition) were designated high CKA neutrophils and cells that demonstrated <51.5% CKA were designated low CKA control neutrophils.

### Proteomic Analysis

[0466] Neutrophils were lysed and underwent sonication and were analysed using the Pierce bicinchoninic acid (BCA) protein assay according to manufacturer’s instructions (commercially available from ThermoFisher, Waltham, MA, catalogue number: 23225) to determine protein concentration. Typically samples contained around 20 micrograms of protein in <500 µl. Samples were digested, desalted and lyophilised prior to liquid chromatography and mass spectrometry (LC-MS/MS) using a Thermo Q-Exactive (Orbitrap) Plus Mass Spectrometer (Thermo Scientific™). First, chromatography separates the peptides in solution, the smaller hydrophilic peptides come off the column in the first fraction, and bigger hydrophobic peptides come off last over a 2 hour period. Secondly, a strongly acidic pH2 solution ensures all peptides have protons and are thus given a positive charge, the Mass Spectrometer only allows through positively charged ions of a given fraction to hit the detector. The Orbitrap device fluctuates between isolate and fragment, at around 20 Hz so the least ‘sticky’ peptides of a given mass/charge ratio are quantified first. The fluctuations are proportional to the intensity of the peptides detected, thus providing protein quantities for each cell type.

[0467] Bioinformatics was performed using the online DAVID system (Huang DW, Sherman BT, Lempicki RA. Bioinformatics enrichment tools: paths toward the comprehensive functional analysis of large gene lists. Nucleic Acids Res. 2009;37:1-13.; and Huang DW, Sherman BT, Lempicki RA. Systematic and integrative analysis of large gene lists using DAVID bioinformatics resources. Nat Protoc. 2009;4:44-57).

### Example 1

[0468] Proteomic analysis was carried out according to the Materials & Methods section herein. Advantageously, a number of proteins were significantly upregulated in the high CKA neutrophils when compared to low CKA controls.

[0469] The following proteins (and thus genes) were upregulated compared to low CKA controls: S100A9, S100A8, ITGB1, CYBB, SYK, DOCK8, COMP, ATG7, SLC2A1, GZMK, CTSG, ATM, IKBKB, BCAP31, TAPBP, PERM, PLEC, ACSL1, RAC1, GM2A, CAP37, and PSMB2.

[0470] The following proteins (and thus genes) were downregulated compared to low CKA controls: ANXA1 and PPP3CB.

[0471] Table 1 presents a number of proteins with changed expression in high CKA cells compared to the typical low CKA cells.

| Protein | log2 (High CKA/Typical) | p-value (t-test) |
|---|---|---|
| GM2A | 1.943649 | 7.66E-06 |
| PLEC | 0.855651 | 0.000199 |
| CYBB | 1.609576 | 0.00024 |
| DOCK8 | 1.454172 | 0.000455 |
| ATG7 | 1.163505 | 0.000737 |
| SLC2A1 | 1.4505 | 0.001259 |
| S100A9 | 1.435349 | 0.001681 |
| ACSL1 | 1.065324 | 0.001746 |
| CTSG | 2.155855 | 0.002295 |
| PSMB2 | 1.058384 | 0.002481 |
| ATM | 2.011409 | 0.002754 |
| BCAP31 | 2.707073 | 0.003322 |
| S100A8 | 0.699763 | 0.003776 |
| ITGB1 | 1.143777 | 0.005138 |
| TAPBP | 1.277103 | 0.005596 |
| COMP | 0.99287 | 0.005695 |
| SYK | 1.722188 | 0.006851 |
| GZMK | 1.8696069 | 0.040591 |
| IKBKB | 2.2958852 | 0.017181 |
| PPP3CB | -1.36037 | 0.000127 |
| ANXA1 | -1.17725 | 0.000792 |
| PERM | 2.00962408 | 0.0379030 |
| RAC1 | 1.9456240 | 0.0100812 |
| CAP37 | 2.70390702 | 0.01459156 |

[0472] The results are presented graphically in FIGS. 2-6 for a number of the proteins, including two-way ANOVA statistical analyses. Advantageously, said protein levels (and thus gene expression levels) provided a robust means for identifying and differentiating high CKA cells from low CKA cells.

[0473] Advantageously, the expression of many of the genes (i.e. at the protein level) was highly statistically-significantly different (e.g. GM2A) between high CKA cells and low CKA cells, indicating that high CKA granulocytes could be identified using just one of the indicated genes.

[0474] All publications mentioned in the above specification are herein incorporated by reference. Various modifications and variations of the described methods and system of the present invention will be apparent to those skilled in the art without departing from the scope and spirit of the present invention. Although the present invention has been described in connection with specific preferred embodiments, it should be understood that the invention as claimed should not be unduly limited to such specific embodiments. Indeed, various modifications of the described modes for carrying out the invention which are obvious to those skilled in biochemistry and biotechnology or related fields are intended to be within the scope of the following claims.

1. A method for determining the suitability of a granulocyte for treating cancer, the method comprising:
a. comparing a measured expression level of one or more genes by the granulocyte, wherein the one or more genes are associated with suitability for treating cancer and are selected from: GM2A, CTSG, CAP37, ITGB1, CYBB, SYK, DOCK8, COMP, ATG7, SLC2A1, GZMK, ATM, IKBKB, BCAP31, TAPBP, PPP3CB, ANXA1, PERM, PLEC, ACSL1, RAC1, and PSMB2, with the expression level of the same one or more genes in a reference standard; and
b. determining the suitability of the granulocyte for treating cancer based on the comparison.

2. A method for identifying whether or not a donor produces granulocytes suitable for treating cancer, the method comprising:
a. comparing a measured expression level of one or more genes by a granulocyte comprised in a sample obtainable from the donor, wherein the one or more genes are associated with suitability for treating cancer and are selected from: GM2A, CTSG, CAP37, ITGB1, CYBB, SYK, DOCK8,COMP, ATG7, SLC2A1, GZMK, ATM, IKBKB, BCAP31, TAPBP, PPP3CB, ANXA1, PERM, PLEC, ACSL1, RAC1, and PSMB2, with the expression level of the same one or more genes in a reference standard; and
b. identifying whether or not the donor produces granulocytes suitable for treating cancer based on the comparison.

3. The method according to claim 1 or 2, wherein step b. comprises:
determining that the granulocyte is suitable for treating cancer or identifying that the donor produces granulocytes suitable for treating cancer when:
i. the measured expression level of one or more of GM2A, CTSG, CAP37, ITGB1, CYBB, SYK, DOCK8,COMP, ATG7, SLC2A1, GZMK, ATM, IKBKB, BCAP31, TAPBP, PERM, PLEC, ACSL1, RAC1, and PSMB2 is increased when compared to the reference standard when the reference standard is from a granulocyte unsuitable for treating cancer; or
ii. the measured expression level of ANXA1 and/or PPP3CB is decreased when compared to the reference standard, when the reference standard is from a granulocyte unsuitable for treating cancer; or
iii. the measured expression level of one or more of GM2A, CTSG, CAP37, ITGB1, CYBB, SYK, DOCK8,COMP, ATG7, SLC2A1, GZMK, ATM, IKBKB, BCAP31, TAPBP, PERM, PLEC, ACSL1, RAC1, and PSMB2 is increased or the same when compared to the reference standard, when the reference standard is from a granulocyte suitable for treating cancer; or
iv. the measured expression level of ANXA1 and/or PPP3CB is decreased or the same when compared to the reference standard, when the reference standard is from a granulocyte suitable for treating cancer; or
determining that the granulocyte is unsuitable for treating cancer or identifying that the donor produces granulocytes that are unsuitable for treating cancer when:
v. the measured expression level of one or more of GM2A, CTSG, CAP37, ITGB1, CYBB, SYK, DOCK8,COMP, ATG7, SLC2A1, GZMK, ATM, IKBKB, BCAP31, TAPBP, PERM, PLEC, ACSL1, RAC1, and PSMB2 is decreased or the same when compared to the reference standard, when the reference standard is from a granulocyte unsuitable for treating cancer; or
vi. the measured expression level of ANXA1 and/or PPP3CB is increased or the same when compared to the reference standard, when the reference standard is from a granulocyte unsuitable for treating cancer; or
vii. the measured expression level of one or more of GM2A, CTSG, CAP37, ITGB1, CYBB, SYK, DOCK8,COMP, ATG7, SLC2A1, GZMK, ATM, IKBKB, BCAP31, TAPBP, PERM, PLEC, ACSL1, RAC1, and PSMB2 is decreased when compared to reference standard, when the reference standard is from a granulocyte suitable for treating cancer; or
viii. the measured expression level of ANXA1 and/or PPP3CB is increased when compared to the reference standard, when the reference standard is from a granulocyte suitable for treating cancer.

4. A method for selecting whether or not a subject is suitable for treatment with a granulocyte or a stem cell for treating cancer, the method comprising:
a. comparing a measured expression level of one or more genes by a granulocyte comprised in a sample obtainable from the subject, wherein the one or more genes are associated with suitability for treating cancer and are selected from: GM2A, CTSG, CAP37, ITGB1, CYBB, SYK, DOCK8,COMP, ATG7, SLC2A1, GZMK, ATM, IKBKB, BCAP31, TAPBP, PPP3CB, ANXA1, PERM, PLEC, ACSL1, RAC1, and PSMB2with the expression level of the same one or more genes in a reference standard; and
b. identifying whether or not the subject is suitable for treatment with a granulocyte or a stem cell for treating cancer based on the comparison.

5. A method for determining a subject’s risk for developing cancer, the method comprising:
a. comparing a measured expression level of one or more genes by a granulocyte comprised in a sample obtainable from the subject, wherein the one or more genes are associated with suitability for treating cancer and are selected from: GM2A, CTSG, CAP37, ITGB1, CYBB, SYK, DOCK8,COMP, ATG7, SLC2A1, GZMK, ATM, IKBKB, BCAP31, TAPBP, PPP3CB, ANXA1, PERM, PLEC, ACSL1, RAC1, and PSMB2with the expression level of the same one or more genes in a reference standard; and
b. determining the subject’s risk for developing cancer based on the comparison.

6. The method according to claim 4 or 5, wherein step b. comprises:
identifying the subject as suitable for treatment with a granulocyte or a stem cell for treating cancer or determining that the subject is at risk of developing cancer when:
i. the measured expression level of one or more of GM2A, CTSG, CAP37, ITGB1, CYBB, SYK, DOCK8,COMP, ATG7, SLC2A1, GZMKATM, IKBKB, BCAP31, TAPBP, PERM, PLEC, ACSL1, RAC1, and PSMB2 is decreased or the same when compared to the reference standard, when the reference standard is from a granulocyte unsuitable for treating cancer; or
ii. the measured expression level of ANXA1 and/or PPP3CB is increased or the same when compared to the reference standard, when the reference standard is from a granulocyte unsuitable for treating cancer; or
iii. the measured expression level of one or more of GM2A, CTSG, CAP37, ITGB1, CYBB, SYK, DOCK8,COMP, ATG7, SLC2A1, GZMK, ATM, IKBKB, BCAP31, TAPBP, PERM, PLEC, ACSL1, RAC1, and PSMB2 is decreased when compared to the reference standard, when the reference standard is from a granulocyte suitable for treating cancer; or
iv. the measured expression level of ANXA1 and/or PPP3CB is increased when compared to the reference standard, when the reference standard is from a granulocyte suitable for treating cancer; or
identifying the subject as unsuitable for treatment with a granulocyte or a stem cell for treating cancer when or determining that the subject is not at risk of developing cancer when:
v. the measured expression level of one or more of GM2A, CTSG, CAP37, ITGB1, CYBB, SYK, DOCK8,COMP, ATG7, SLC2A1, GZMK, ATM, IKBKB, BCAP31, TAPBP, PERM, PLEC, ACSL1, RAC1, and PSMB2 is increased when compared to the reference standard when the reference standard is from a granulocyte unsuitable for treating cancer; or
vi. the measured expression level of ANXA1 and/or PPP3CB is decreased when compared to the reference standard, when the reference standard is from a granulocyte unsuitable for treating cancer; or
vii. the measured expression level of one or more of GM2A, CTSG, CAP37, ITGB1, CYBB, SYK, DOCK8,COMP, ATG7, SLC2A1, GZMK, ATM, IKBKB, BCAP31, TAPBP, PERM, PLEC, ACSL1, RAC1, and PSMB2 is increased or the same when compared to the reference standard, when the reference standard is from a granulocyte suitable for treating cancer; or
viii. the measured expression level of ANXA1 and/or PPP3CB is decreased or the same when compared to the reference standard, when the reference standard is from a granulocyte suitable for treating cancer.

7. The method according any one of the preceding claims, wherein the method further comprises measuring the expression of the one or more genes.

8. The method according to any one of the preceding claims, wherein the granulocyte is a neutrophil.

9. The method according to any one of the preceding claims, further comprising measuring the expression level of one or more gene selected from: S100A9 and S100A8.

10. The method according to any one of the preceding claims, wherein the one or more genes associated with suitability for treating cancer are one or more genes associated with:
a. killing cancer cells and are selected from: GM2A, CTSG, CAP37, CYBB, GZMK, ATM, PERM, ACSL1, ATG7, SYK, DOCK8, RAC1, and PSMB2; and/or
b. locating and/or binding to cancer cells and are selected from: ANXA1, ITGB1, COMP, SLC2A1 and PLEC; and/or
c. recruitment of immune mediators and are selected from: BCAP31, TAPBP, IKBKB, and PPP3CB.

11. The method according to any one of the preceding claims, wherein the expression level is measured by proteomic techniques.

12. The method according to any one of the preceding claims, wherein the expression level is measured by transcriptomic techniques.

13. The method according to any one of claims 1-3 or 7-12 further comprising selecting a granulocyte when the granulocyte has been determined to be suitable for treating cancer or selecting a granulocyte from a sample obtainable from a donor when the donor has been identified as a donor that produces granulocytes for treating cancer, preferably wherein the selecting comprises isolating the granulocyte.

14. An in vitro method for obtaining a granulocyte for treating cancer, said method comprising obtaining a granulocyte from a sample obtainable from a donor wherein said donor produces granulocytes comprising:
a. increased expression of one or more of ITGB1, CYBB, SYK, DOCK8, COMP, ATG7, SLC2A1, GZMK, CTSG, ATM, IKBKB, BCAP31, TAPBP, PERM, PLEC, ACSL1, RAC1, GM2A, CAP37, and PSMB2 when compared to a reference standard, wherein the reference standard is from a granulocyte unsuitable for treating cancer; and/or
b. decreased expression of ANXA1 and/or PPP3CB when compared to a reference standard, wherein the reference standard is from a granulocyte unsuitable for treating cancer.

15. An in vitro method for obtaining a stem cell for treating cancer, said method comprising obtaining a stem cell from a sample obtainable from a donor wherein said donor produces granulocytes comprising:
a. increased expression of one or more of ITGB1, CYBB, SYK, DOCK8, COMP, ATG7, SLC2A1, GZMK, CTSG, ATM, IKBKB, BCAP31, TAPBP, PERM, PLEC, ACSL1, RAC1, GM2A, CAP37, and PSMB2 when compared to a reference standard, wherein the reference standard is from a granulocyte unsuitable for treating cancer; and/or
b. decreased expression of ANXA1 and/or PPP3CB when compared to a reference standard, wherein the reference standard is from a granulocyte unsuitable for treating cancer.

16. A method for preparing a stem cell suitable for treating cancer, the method comprising:
a. identifying a donor that produces granulocytes suitable for treating cancer according to the method of any one of claims 2-3 or 7-13; and
b. obtaining the stem cell from a sample obtainable from said donor.

17. A method for producing a stem cell for treating cancer, the method comprising:
a. providing a stem cell obtainable from a sample from a donor wherein said donor produces granulocytes comprising:
i. increased expression of one or more of ITGB1, CYBB, SYK, DOCK8, COMP, ATG7, SLC2A1, GZMK, CTSG, ATM, IKBKB, BCAP31, TAPBP, PERM, PLEC, ACSL1, RAC1, GM2A, CAP37, and PSMB2 when compared to a reference standard, wherein the reference standard is from a granulocyte unsuitable for treating cancer; and/or
ii. decreased expression of ANXA1 and/or PPP3CB when compared to a reference standard, wherein the reference standard is from a granulocyte unsuitable for treating cancer ; and
b. differentiating the stem cell into a different stem cell (preferably a precursor cell); and
c. optionally isolating the different stem cell (preferably the precursor cell).

18. The method according to any one of claims 15-17 wherein the sample comprises a somatic cell and obtaining the stem cell from the sample comprises reprograming the somatic cell into a stem cell.

19. A method for isolating a granulocyte or stem cell for treating cancer, the method comprising:
a. contacting a sample of granulocytes or a sample of stem cells with a binding means, wherein the binding means binds to one or more polypeptides selected from GM2A, CTSG, CAP37, ITGB1, CYBB, SYK, DOCK8,COMP, ATG7, SLC2A1, GZMK, ATM, IKBKB, BCAP31, TAPBP, PPP3CB, ANXA1, PERM, PLEC, ACSL1, RAC1, and PSMB2; and
b. isolating the granulocyte or stem cell, respectively, based on the presence or absence of binding between the binding means and the one or more polypeptides.

20. A method for producing an engineered granulocyte or stem cell for treating cancer, the method comprising:
a. providing a granulocyte or stem cell, respectively; and
b. engineering the granulocyte or stem cell, respectively, to:
i. increase expression of one or more genes selected from: GM2A, CTSG, CAP37, ITGB1, CYBB, SYK, DOCK8,COMP, ATG7, SLC2A1, GZMK, ATM, IKBKB, BCAP31, TAPBP, PERM, PLEC, ACSL1, RAC1, and PSMB2; and/or
ii. decrease expression of ANXA1 and/or PPP3CB;
thereby producing the engineered granulocyte or stem cell, respectively, wherein the
engineered granulocyte or stem cell, respectively, is suitable for treating cancer.

21. A stem cell for treating cancer obtainable by the method according to any one of claims 15-20.

22. A stem cell which is capable of differentiating into a granulocyte for treating cancer, wherein the granulocyte comprises:
a. increased expression of one or more of ITGB1, CYBB, SYK, DOCK8, COMP, ATG7, SLC2A1, GZMK, CTSG, ATM, IKBKB, BCAP31, TAPBP, PERM, PLEC, ACSL1, RAC1, GM2A, CAP37, and PSMB2 when compared to a reference standard, wherein the reference standard is from a granulocyte unsuitable for treating cancer; and/or
b. decreased expression of ANXA1 and/or PPP3CB when compared to a reference standard, wherein the reference standard is from a granulocyte unsuitable for treating cancer.

23. The stem cell according to claim 21 or 22, wherein the stem cell is an induced pluripotent stem cell, or wherein the stem cell is a haematopoietic stem cell, a common myeloid progenitor cell, a myeloblast, a N. promyelocyte, a N. myelocyte, a N. metamyelocyte, a N. band, or combinations thereof; preferably wherein the stem cell is a haematopoietic stem cell.

24. A method for producing a granulocyte for treating cancer, the method comprising:
a. providing a cell; and
b. converting the cell into a granulocyte wherein:
i. the measured expression level of one or more of GM2A, CTSG, CAP37, ITGB1, CYBB, SYK, DOCK8,COMP, ATG7, SLC2A1, GZMK, ATM, IKBKB, BCAP31, TAPBP, PERM, PLEC, ACSL1, RAC1, and PSMB2 is increased in the granulocyte when compared to a reference standard when the reference standard is from a granulocyte unsuitable for treating cancer; or
ii. the measured expression level of ANXA1 and/or PPP3CB is decreased in the granucloyte when compared to the reference standard, when the reference standard is from a granulocyte unsuitable for treating cancer; or
iii. the measured expression level of one or more of GM2A, CTSG, CAP37, ITGB1, CYBB, SYK, DOCK8,COMP, ATG7, SLC2A1, GZMK, ATM, IKBKB, BCAP31, TAPBP, PERM, PLEC, ACSL1, RAC1, and PSMB2 is increased or the same when compared to the reference standard, when the reference standard is from a granulocyte suitable for treating cancer; or
iv. the measured expression level of ANXA1 and/or PPP3CB is decreased or the same when compared to the reference standard, when the reference standard is from a granulocyte suitable for treating cancer; and
optionally isolating the granulocyte.

25. The method according to claim 24 wherein the cell is a stem cell according to any one of claims 21-23.

26. The method according to claim 25 wherein converting the stem cell into a granulocyte comprises differentiating the stem cell into a granulocyte.

27. The method according to claim 24 wherein the cell is a somatic/differentiated cell, optionally from a donor who produces granulocytes suitable for treating cancer as determined according to any one of claims 2-3 or 7-13.

28. The method according to claim 27 wherein converting the somatic/differentiated cell into a granulocyte comprises transdifferentiating the somatic/differentiated cell into a granulocyte.

29. A granulocyte (e.g. obtainable by the method according to any one of claims 13, 19-20 or 24-28), wherein the granulocyte comprises:
a. increased expression of one or more of GM2A, CTSG, CAP37, ITGB1, CYBB, SYK, DOCK8,COMP, ATG7, SLC2A1, GZMK, ATM, IKBKB, BCAP31, TAPBP, PERM, PLEC, ACSL1, RAC1, and PSMB2 when compared to a reference standard, wherein the reference standard is from a granulocyte unsuitable for treating cancer; and/or
b. decreased expression of ANXA1 and/or PPP3CB when compared to a reference standard, wherein the reference standard is from a granulocyte unsuitable for treating cancer.

30. A composition for treating cancer (e.g. obtainable by the method according to any one of claims 13, 19-20 or 24-28), the composition comprising granulocytes: wherein at least 90% of the granulocytes comprised in the composition have:
a. increased expression of one or more of GM2A, CTSG, CAP37, ITGB1, CYBB, SYK, DOCK8,COMP, ATG7, SLC2A1, GZMK, ATM, IKBKB, BCAP31, TAPBP, PERM, PLEC, ACSL1, RAC1, and PSMB2 when compared to a reference standard, wherein the reference standard is from a granulocyte unsuitable for treating cancer; and/or
b. decreased expression of ANXA1 and/or PPP3CB when compared to a reference standard, wherein the reference standard is from a granulocyte unsuitable for treating cancer.

31. The composition according to claim 30, wherein at least 95%, 99% or 100% of the granulocytes comprised in the composition have:
a. increased expression of one or more of GM2A, CTSG, CAP37, ITGB1, CYBB, SYK, DOCK8,COMP, ATG7, SLC2A1, GZMK, ATM, IKBKB, BCAP31, TAPBP, PERM, PLEC, ACSL1, RAC1, and PSMB2 when compared to a reference standard, wherein the reference standard is from a granulocyte unsuitable for treating cancer; and/or
b. decreased expression of ANXA1 and/or PPP3CB when compared to a reference standard, wherein the reference standard is from a granulocyte unsuitable for treating cancer.

32. A pharmaceutical composition comprising:
a. the granulocyte according to claim 29, the stem cell according to any one of claims 21-23 , or the composition according to claim 30 or 31; and
b. a pharmaceutically acceptable carrier, excipient, adjuvant, and/or salt.

33. The pharmaceutical composition according to claim 32, further comprising TNF-alpha.

34. The pharmaceutical composition according to any one of claims 32-33, further comprising a granulocyte-macrophage colony-stimulating factor (GM-CSF), a granulocyte colony-stimulating factor (G-CSF), a growth hormone, and serotonin, vitamin C, vitamin D, glutamine (Gln), arachidonic acid, AGE-albumin, an interleukin, TNF-alpha, Flt-3 ligand, thrombopoietin, foetal bovine serum (FBS), retinoic acid, lipopolysaccharide (LPS), IFN-gamma, IFN-beta, or combinations thereof.

35. The pharmaceutical composition according to any one of claims 32–34, further comprising a granulocyte-macrophage colony-stimulating factor (GM-CSF) and IFN-gamma.

36. A kit comprising:
a. the granulocyte according to claim 29, the stem cell according to any one of claims 21–23, the composition according to claim 30 or 31, or the pharmaceutical composition according to any one of claims 32–35; and
b. instructions for use of the same in medicine.

37. A granulocyte according to claim 29, stem cell according to any one of claims 21–23, composition according to claim 30 or 31, pharmaceutical composition according to any one of claims 32–35, or kit according to claim 36 for use in treating cancer.

38. Use of the granulocyte according to claim 29, the stem cell according to any one of claims 21–23, the composition according to claim 30 or 31, the pharmaceutical composition according to any one of claims 32–35, or the kit according to claim 36 in the manufacture of a medicament for treating cancer.

39. A method for treating cancer comprising: administering to a subject in need thereof the granulocyte according to claim 29, the stem cell according to any one of claims 21-23, the composition according to claim 30 or 31, the pharmaceutical composition according to any one of claims 32–35, or the kit according to claim 36.

40. The granulocyte for use, stem cell for use, composition for use, pharmaceutical composition for use, or kit for use according to claim 37, the use according to claim 38 or the method according to claim 39, wherein the cancer is one or more of: pancreatic cancer, liver cancer, oesophageal cancer, stomach cancer, cervical cancer, ovarian cancer, lung cancer, bladder cancer, kidney cancer, brain cancer, prostate cancer, myeloma cancer, non-Hodgkin’s lymphoma (NHL), larynx cancer, uterine cancer, or breast cancer; preferably wherein the cancer is pancreatic cancer.

41. A cell bank comprising the granulocyte according to claim 29, the stem cell according to any one of claims 21–23, the composition according to claim 30 or 31, or the pharmaceutical composition according to any one of claims 32–35.

The application's sequence listing, which the Patent Office published only in electronic form, follows.

SEQUENCE LISTING (87 sequences)

SEQ ID NO: 1 - DNA, 2733 bp, Homo sapiens
aactgactgggcagcctttcaggaaagatgcagccactcctgcttctgctggcctttctcctacccactggggctgaggcaggtgagtgaccatccccaccctcagaggcctgacctcatcccatagattcttgagccaaattgccttggtatatcctaattctgtactgttgagcaagttatttgaatttgtgtttcctcatctataaaatgagaataatattaataccgatcttgcagagttgccatgagagttaaataagttagagtatttaaatgtcttggaattgcccgcacactataagtgctataaaaacatgctttgtgtaaataatttggcagcatgtgtcagaccctacctaggaggtaagaatacagcaataacagtaccatcagctcatgtctagatttttaaacaccagtcccacgtggtcttgaattggactcagagggctctgggaagctccatgaggataaaagtataagggaacttcaggaacaatcctgtacttacagcaaagcattctcctcaatacctgaggctgaagctggccttgcctggaacaagggttgttctccctcttttggagaggaggagggaggtgaggcctaggatggggaaaagggctcctttcaagacagcagtgtttcctgtagaaccctggagccccctcccaatctgctgccccatagactccaagcctcagcaccatctcctccctctcctgcaccctctctcctgccgtccccatcttccagcctttctggagccaccaatctggtacccacattgcaggttcagcaagcatagagctaagtgccaaatgcttccttccaggggagatcatcggaggccgggagagcaggccccactcccgcccctacatggcgtatcttcagatccagagtccagcaggtcagagcagatgtggagggttcctggtgcgagaagactttgtgctgacagcagctcattgctggggaaggtgaggagctaaggaacttcctggccagccaggaacacagccctgcggagctcttcggtggaagagccatctgaaagaagagttgtagcaatgaaagggtgaaagaaagaccaagtgagtctttgcgggagggaacaggccagtgtaaatgaggaggaaaggaggataagatcaaaaagagcaagaggaagagatggaagacacatattggggctcaaaatataaactcaggctatttatcaacttaatctggggaagcaaacctgaaggcaagtaccaccctgtcatccctagctcagagctgctgagaaagaggatacagctgagccccagggccctcccatcccctcgattctggttagctgcagtcttgccctccccgtgctgtctgcctaccctgcagagctggtggaccatagctcctgcagcccagacctacctcttgcttttgcagcaatataaatgtcaccctgggcgcccacaatatccagagacgggaaaacacccagcaacacatcactgcgcgcagagccatccgccaccctcaatataatcagcggaccatccagaatgacatcatgttattgcaggtaccacctacctggccctctggctccttcctagtgtgtccggggacaatggaggaggaagtgagggcaaggctccggggtggcggggagggcatgggatgtgtactgcaccagcgacccccgagccttggctggaggccccagctgagcgggaacgcctacattcttcctccagctgagcagaagagtcagacggaatcgaaacgtgaacccagtggctctgcctagagcccaggagggactgagacccgggacgctgtgcactgtggccggctggggcagggtcagcatgaggaggggaacagatacactccgagaggtgcagctgagagtgcagagggataggcagtgcctccgcatcttcggttcctacgacccccgaaggcagatttgtgtgggggaccggcgggaacggaaggctgccttcaaggtaaggcatgggcattggccaacacaccccgggagagaggggcccgtgcagagccaggcagtgcgaacagattccatccccacagcctcagcctggcagccagaccagggtgggctggggattgttttccccatcaacctggtctctgggggaataggaggaagacccacaacacatacataggcaacattctcctggagaagggagaggtaccttgactcagattgggctggagacagtaattaaggcagagctgaagtccagcgaccgaaaagatccagaggcttggctcctgtaccccaccgatcttccatctcacacacacccagcaattgaaggggcccacccacccctgccttccctgagagcccggagctcagggaagcaggagcagggaggcctgtctcagtctcccttctcctctctacctacagggggattccggaggccccctgctgtgtaacaatgtggcccacggcatcgtctcctatggaaagtcgtcaggggttcctccagaagtcttcaccagggtctcaagtttcctgccctggataaggacaacaatgagaagcttcaaactgctggatcagatggagacccccctgtgactgactcttcttctcggggacacaggccagctccacagtgttgccagagccttaataaacgtccacagagtataaataaccaattcctcatttgttcattaaacgtcattcagtactta

SEQ ID NO: 2 - DNA, 4182 bp, Homo sapiens
ctgccccgccatgacccggctgacagtcctggccctgctggctggtctgctggcgtcctcgagggccggtgagtgcctctctgtgccggtggtcccccatctgtgctagggcccggctgccagggcagaactcagacttaaagcacagagaaggcaagcggcttggcctgggtcacacagccagcccggcctggacgatcccgcgaaaggcgtgagggcggacggtgtgcgggactcaggggccccctgtcctcttagggagtgggacgatgggggagggtgggtccccccgcagccccactgggtggatagagctgaggctgcagcttcacacgccctcccggccactgtgtggattcttggggatctcagagctgtctccccccgacccaggctccagcccccttttggacatcgttggcggccggaaggcgaggccccgccagttcccgttcctggcctccattcagaatcaaggcaggcacttctgcgggggtgccctgatccatgcccgcttcgtgatgaccgcggccagctgcttccaaagccagtgaggggtcctggggagggggcctagggggcattggggctcagagaaggggcttggggggcttaggcattcagtgggggtgcttggtaggtgaggaggggaggggattgcaaaaggaggggctcagggaaaggagggggcttggagagggaaatggggactgagttgaggagggacccaaggatattggggggctcagatggaggaggcccagagaagggaagggggtcagatggaggaggcccagagaaaggaagaggctcagatggaggaggtgcagtgaaggaaagggggtcagatgggggaggcccagagaagggaaggggctcagatggaggagggggcccagagaaaggaaggggctcagatggaggaggtgcagagaagggaagggggtcagatgggggaggcccagagaagggaaggggctcagatggaggaggtgcagagaagggaaggggctcagatggaggaggtgcagagaagagaagggcctcagatggaggaggtgcagagaagggaagggcctcagatggaggaggtgcggagaagggaagggggtcagatggaggaggtgcagagaagggaagggggtcagatgggggaggcccagggaagggaaggggctcagatggaggaggggcagagaagggaagggggtcagatgggggaggcccagggaagggaaggggctcagatgggggaggcgcagagaagggaagggggtcagatggaggaggtgcagagaagggaagggggtcagatgggggaggcccagataagggaatggggtcagatgggggaggtgcagagaagggaagggggtcagatgggggaggcccagataagggaaggggctcagatggaggaggtgcagagaaggggagggggtcagatggaggaggctcagagaagggaagggactcagatggaggagggggcgcagagaagagaaggggctcagatggaggaggaggcgcagagaagggaaggggctcaagatgggaagggggccctggaaagtctcggctctgcttctgtaaaagcgggggagttttcagggtgaaggattgcagtctgcaggctgggatcccccctaatttgcaagccggcttgctctgtgcccaggccccagcctggtgtcctccctctgccctttcctccgctactctcaggaaccccggggttagcaccgtggtgctgggtgcctatgacctgaggcggcgggagaggcagtcccgccagacgttttccatcagcagcatgagcgagaatggctacgacccccagcagaacctgaacgacctgatgctgcttcaggtgagaggatggtgccacctgtgatcccagcacctcgggaggccgacgttagccagggaaacaagtccaaacttggtctctacaaaaaaatacaaaaattagccgggagtggtggcgcgcacctgtggcccctgtgcttcaggaggccgaggcggaaggacggcttgaggtcaggagttcgagaccagcctgggcaacatggccaaactcagtctctacaaaaatatatatgtgtgtgtgtgtgtgtgtgtgtgtgtgtgtgtgtgtgtatcttgccgggtgaggtggctcatgcctgtaatcccagcattttgggaggccgaggtgggcggatcacgaggtcaggagattgagaccagcctggccaacatggtgaaaccccatctctactaaaaatacaaaaattagccaggcatggcagcgggcgcctctagtcccagctactcaggaggctgaggcaggagaatcgcttgaacccgggaggcggagcttgcagtgagccgagatcgcgcccctgcactccagcctgggtaacagagccagaccctatctcaaaaaaaacttccaaaaacaatacagcaacacatacagatgtaccacggttcgcgtatggagcctcctgttggtggagactgacgtcgttttcaaatgcttttgctatgacagaatcatgtgaatgtttttcatgtttggtttttttctttgagaaaatgataaaattatctcaaaaatatcattaaaaaatttaaaaaagtagagacgggggtttcaccttgttggccagtttggtctcgaactcctggcctcaagtgatccacccaccttggcctcgcaacgtgctgggaatacaggcgtgagccaccgcacccggcccctgccgggaattaaacgcaaaccacttacagactacagttaatgtcgctgacacttctgctcccaggggtccccatgaggctccagtccccagggccaccctcccctgactccatttccttccccagctggaccgtgaggccaacctcaccagcagcgtgacgatactgccactgcctctgcagaacgccacggtggaagccggcaccagatgccaggtggccggctgggggagccagcgcagtggggggcgtctctcccgttttcccaggtttgtcaacgtgactgtgacccccgaggaccagtgtcgccccaacaacgtgtgcaccggtgtgctcacccgccgcggtggcatctgcaatgtgagtgctccctgtggcgggaggaggggtcctgagaggtactgagctctccgtggcaggagaaagcaagtgcaggctgagggcggcacagcaggggggccccaggattgagcattttcacggtaggagaaacagtatctttttttttttttttgagacagagtctcgctctgtcgcccaggctggagtgtagtggcgtgatctcggcggctcactgcaacctccgcctcctgggttcaagcgattctcctgcctcagcctcctaagtagctgggattacaggcatgcgccaccacgcccggctaattttgtatttttagtagagacagggtttctccatgtgggtcaggctggtctcgaactcctgacctcatgatcgacccaccttggcctcccaaagtgttaggataacaggcatgagccaccgtgcctggctgagaaacagtagctatcaaacgccggctgtgagccacgtctgtgctgggggttggggacccagcaggcatggtagagccggtcactgagggactcaggcgtgtgattgccaggggaggggcacctggcccagcctggaggtgccaggaagctccagaaagcaactgatcccaaagtccactagcagttaaccagggcagagaaagagaagagccatgcaaaggccctggggctggatcaggacttgtaggttccaggggcagcaagaggcctctgcagttctggggtggcgtgggagccaggccctgggacgccctgacacagctgctgcctgcccagggggacgggggcacccccctcgtctgcgagggcctggcccacggcgtggcctccttttccctggggccctgtggccgaggccctgacttcttcacccgagtggcgctcttccgagactggatcgatggtgttctcaacaacccgggaccggggccagcctaggggggcctgtgacctcccatggagcccagccccgccctccacacctccggcgctccgcacccacctcccacggccccgcccctgcccccgctccggccagaggggccctggctgtaataaagaagccgatctctcctctgc

SEQ ID NO: 3 - DNA, 57913 bp, Homo sapiens
gccagcccgcgggagaggcccagcgggagtcgcggaacagcaggcccgagcccaccgcgccgggccccggacgccgcgcggaaaaggtaggggccggcgggcctcgggtgtgggagcgcgggccgcggcctccggtctcctgtgcgcggcagcacttaaagccgccggccgggccgcgccgggacctttgtgccgggcgtgggggtgggggcgggggcgggggcgggggcggccgccagcggttgggggctggggcaggattccaggctagtccaggaggaagtccgcacgccgccacccgcctcgggtccccggcgctggcagcccccgggcgcagagccagcccagccgcgttccgaacgtgagggtcgccggcctgggcgctgtcacgtcggggctgccggagctgcgggggaccgggcccgaacggcccctgacacctgcggtctcccgccgggctgggcaagcgcaggtgggagccagcgaggccacccggggctcggcgtttgggactcggcgctcccctggacgggtccggtgcctttgtctctcgctccctcgcgagctgctgtccttggagcagcgtcgagccagccgtcggcgcccgcgacggggactggtctcctccggctgccaggaggcggccctggggccagcgccgcgggcgggggcggcgggagccgggtagaagttggcttagtggagccgctggggaccgggggtgcggtggcggcagtgcagtccacttccccgtgtttataaacgtcaagagtcgccggtccctgccgggcaccccgggaccaggacgcatggccatggccagcttgtgctcagacccggtccgcgagcctgagagcccggcctgtgtctagtatcattttaccgcgtgtcatttcttaggcttcataaattggatttatgagactcctactctctaagtaacttttatttaatcaaattcgtgcttttgagtccaaaactttgcactcattggtatgatcattagtaagttgcattctctaagcttccgtttcctcatctgtgaaataggaacagtaatatctacattaataattcatttttataataatgacagtgagggccaagtttagctctaggcattttacatgtattatttaattctggaaccgctctaatgagattggtactgtttcgattcccattttccgagtgaagaaactgaggcacagggagcaaaagtaagttgcctgtggtcatcaggagctcctggagaaggcatggggtctagttccagagtccgcgtttaaaccacaagtaaccttcctaactatagttctgaaaatcaaatgcaaaatgtaaaaaacttagcttgagagtagatgctcaatgagtattgactccttttcagcccttcttttatagtaaaaagatgttaaaaatatctcggaagataattggtaacatcattggtaaggtttctttgggccaacatgccacatggttaacttaggtgggtagaattactaggttatttcgttttgttttgagacagggtctctgttgcccaggctggagtgcagaagagccatcacagctcactgcagcctcaacctccgaggcttaagttacttttccacctcagcctcttgagtagctgggactacaggcgcctgccaccgtgcccggctaatttttttattttttgtagagacaggatttcactatgctgcccaggctggcctcaaactcctgggctcaagctgtcctctctcaccgagctcccaaagtgctgggattacaggcgtgagcccctgaacctggcccttaggtttttttatttttttttttttaattgtagttttaatgctacaaaaataacatgctagaggaatttagattagacacctttcttaaaccacatacgtcctttacgataggttatacagtagaccaattttagaaatgattaaggaacttcagttggcagttacctgttcatttgtggacatcaaggcccagaggggttaggacttagagtctcactataattctcatatttttaaataatgttgactcattgatcaatattatataagtgactgaagatggtgaagtgttaaataaaaaacattggtattttcattacaggcatttggggagaaagtcattttacttatcccaaaattgagtatgaaggtggaagatgttattagaatgctagttaaaaggacaaagaatgtggttaatactttaattctgtaaacaggaagcaaatagattgtttaactcgtctgtgttgacttcagacctaaacctacaattttaagtgtttgtgattttcttaatgtaaagttctatattaaagttattttttaataccctcaacattctgcacatgagaagcatggaatcagcaattctgaaagtcactggatttagtaattttaacaattaggcagctttctggtcagtataatttaatttaaatcagccccgaattaccatcacgaatgaaaatgtagctctacattggtgttcttcctaactctgggagtgacactggggacatctggtcatattataataatgaaaagtggtcaaacaacttaacatggtgccagttttcctaagcgtgcttgccactgattgtaatgcttttattgtttggcttcttgataagtaagttatggcttacagcggtgagtagtatagtgttctgtctgaaaacatattcattaatattctgtagctgctctggtttgcccttaactatgctgctagtgtgataagctgaaacatcttgtaactggtaaaagtttcagagaacttaactttctgaatatgtaacaagctgcatgtatctgaaagggttcatttagacttctgttagatattagcagattttctcactctgccagagagttaggatctgttaggttgtgggtggaatcctggagattatgccgggtaaatatgtaagtacctgtattgtattagcagtgtttactctgacttggttttaggttctgagagtttggctggttattttttcagaggtgggaggtatggagtagagacgttaagatacagaaaggtacattcgtcttctgaatcctgaagtgttatgctagaggtatctatagctgtggaaaactgaaaagatattatggtatgtacccagcttaaagggggtacagtccgtaaaagtcagaatattagcagccttccaatatgtctgtcggtaggtgaaaaaaaaagtttctctctttcaggagctgtgtacaaaaggatccaaactatactttgtacatttgttattgttttaaaagtggctgtgagtttttagaggtcagctaactttaaacttgccgtttggtttgtgactttagaaggtagagttaactatatttagcaatatgcttaagcgtgtgcatatcacctcatgaaacgtgtgtgtgcatgagaaaagctgcctccagtacacatacatatgtatatacacacatacacacaagcacatatatgtatgtatttcttataggaccaatctcattgtacataatttcaaagcacaggttcctatctccagggatgcataaaaagactcactgaagtatagggagaaaattttaggtctactattatgtttgttgatctcatcactttaaaatttaaaattttgattatgattgataatcttactatattgctgtagaagtacatgtatctgaatttataaattgcatttattttgggtacaggtatgcctagaatttttttgctgataaaggtgagtggtcagaaagctttgcagatccctatatggaggatgatttgagtggggttcaagaactactgtatttgggagggagaactgataagacttgataagagaaataaaagaaacccagtgtgacactggtttctggctaggaggtgctgttcactgaggtgagagggtgaccacaagctgggggtgctggttggctggagcagaggggaaatgatgaccttatgaggccaagtttttttttttaaggtgaccatgggacataggtggagatgtctaaattgcagttgaatacacagattgagagcttaaaaaaagaaaaaactctgagagatttcaatttgacaattcttagtctattgctggttgaagctataggctgtgcatgcaaacaccaaaggagggtgtggagtgaaaaacgggctgaaggaggacctgggaacacttttaatagtcaagggggggtggaggaagaggaatctagaaaagcatttaccttccccagtttcttctctgaacttctaattcctttgagtggcatttttgtgagtgacataggtatttctgggtttttccagtgattggcatgtttgagttaaagacagaaagacttcattggtcacatttctttgtggtaatttattttcagatacctgatcagagaagcagtttgatgtactaaaggcttctcgattgggagacaggaaacctgggtgtcagtgccgggtctgccactgaatttctgtgtgacctttgtcagagtactgtacttccagagcgttggtttccacatctaccctataaagcagcctgcatgtttctctcattctctcgttcgaggagttggaggatagctgctgcctgatgtaagtagagtgcagttctctctccatgagcaactttttttttttttgtatcaccagagagtgtaggcactgtgccacttactctgttaaggatacctgccagcgctgaccagcaacatctgtccctgtcagctctgcatcaggatgtagcttggctgtacattacattttattctatcagtacattgagtaccagttacctgaaaaatgctttactcagtggacatgaatcaagaagttggcatgctctttgatgttgagtctgttgtctaattggaacaagttgtgttcagttcaggaaaacataaataccaaagagtgttttatacaatgtactgtaccataaaatactgtaccatgtaatattccctaacaatgttagaaaaatctcagcattggcttgtgtggttttggaacacgttgtgtaggagatgaggcctgagcttggaatggtatgagcgaaggttggatgacagatggttgtcacattcaaggacagcatgggaagaatccaatctaatttcacagatagtacctggccactttgttacctattaggagttatgtataatatcatatatatcagaaggatatgtgaaggctatataaaatgaaggcctgggttcttgccctccaatactagcctgatgagagacacagacatgaatacaattagttacaatagaagtttgaatagaaataacactatattattaagcatcactgaagatttgtcattcactctgctgggcactatcaaagctgttttggaaccacagagaaggagtagttaattaagttgattgtggttggtgaggagatgaagaggcaataaagacagaaaggaagaagaaaaatcagcattctattttgtgtagggagtatagtttcagtggagtgatgaggaaaatatttacatacgaaattaggtatgtaccatttggagtatggaagtcacatttttctgtataaatgtttattgaatgaatatgtaaataacttaagctttcgtaatctatgaaattagcaatagattattcttctccatgtacaatattttatggtttatgtatgattttcttcatattatgatttcagtgcttcttttaaaggggtggtacagggtcatgtttattggaggaggaaattggagtttgaaaaagcacatttggtagtataatgttatgttagaaaaatgttacaaaaaagtacaatagggagtaagatttatgcttattaaagaagcatggattaaaaagattgagaaacatttattaaagagtcactgaggttcttgttttagaaggccatgattaatgagttggagaacaagaagcaaatttggtaatcatgtaaattatgagctgctgaccacctagaaatatatttgctgataagagctttcatataatgatcatattttatctttccaacaattagatactgtttacagcttactgatgtgtaaaatgagaaactttttttcctatgtttatcatggttttaaaacatttatcatgtatttaaaatactgtatgcactccaccacagacaggatggagaggaagatgtgacaaaagatgtggtcaaaattagttttaatcaaggaagcattttggaatgatctgcttaaaaagtggatataattacgcagtttgagaagataattctccttaattgaaattacggggaataagtcttgctctcaggtgcttattgataccgttgatcatgctggttcttttgctggctccactcacaattatctttgacaacttgccccaaagtaaactttctcaaccaaaaccgttcccaacttctttcctcctcacagggaaaggcaaaaaagtccgcaggcatagagagtggaaagaaggaacagcatactaggctggtttgaaaaacaatcaattgctaggtaataatgtcttaccttttgagtggaaggaggagctgggaagaattaagttcgggcaggttttttgctcattttggatcagcccttcatattatggcttaatagctttgtttatagtgtatttttctgcttttacgttcatcctctgaagtcttgagttaattttgtgcccctttacccccatttgaattaaatgcttcatttttttcccgtttctcacataaagctatttttttttcaggacagggaggggctggtggtggtggtggtgctgtaccagttgtctgtttatgagatcaccattagacaacgtttctcattggcttgaattatttgaattttgtgtgattttcctgttatgttgattctgttcttggtgtctatgagttctgtagaggattccagcctaaattttcttccttagttctgtttacttttcctcgacttttgtggttttgctctttgatcactgtcaagatctatttgagattttctgactttcttgaagagcagaatgagatctagattttctcttatttttaaagaagattcttcactgacttcctttcactttttgttctgtggaagtctttcctaggtgttaagtttccaggctttacctccccctacccccaacgtattatctttaggcattttgtttgccaatgcgtactatatccattatttatctttcccttgcacttgtagattgggtggtgataaaaatcttccatatttcattttcctggagaaggcgggtagagtcactagtgatgaattttatcttcaatctgttgtataattttcttaaagtatctcgccgtgttgtgagctgttctcagatttcaaattgttttgtgaacctatagctttggagcagccaaacctttgttgttagagcttcttagcccaggctatcattatcattgtgtgagaaggggttagtgctctttaaaaagccatttttcttctgggtgggagtggtgaattttagatggttttctaattcagactacttttctgtttgtcaaggagaggagaagaggacttcaaatgtggtgttacatctttgggatcccttagcctcttctctttcatgtctccttttttttcttctctattctttctgcgaagttttgttaatcattaatgctagcttattaatatttgggccataaacacctctgtagtgaccaacacacctcttcctgccagatggaaggaaaaaaagtgttgagttttaattgttcttcctgtaaggggaaaggttccctttccatgggaggaactcatctccacatgtcaccctctcagatggtacagaattcagaaagatttctcagtttcttccattcatgtttttctcgtttttattactctctatgtgggataagtgggaggaacctcatgtctttcaatttggctctgtgttcttcttctggaatatattgatttttaaatactaaaatctgttattggcctatttcttccccttttaaaagcagatacagaaaataatgatggtagaacagacttgggatgaatccaagtttattataatttttaggagacatttatgatatacctctataggtatcagaatcttttctactattaaggtgaaaagatttgagattttgtgaaatcttttgtgtattctttttatttgagttggcttttaggtggcttatttttcaactctgaaatgaacataacatgttacatatgttacatatgttacaatttttttctaaagtgtagttgtttaatttctacaaagatagtccatataaagtttctaaagattgtaaatttaaaaggaaatgccaaatgaattatttgtaaaattgtttaaaaaaattaataaataatgagtgtgtatttaaaagtttgaacatgatataaaaccatacttttatggataaagattagtttacagtgaagattaaaacaattatgcactatttttgacagtggaaacaattgcacatatttgggttaaccactaaaatgagattatttgtgggtggtgtttaagattgtttattgttcagggaatgaattatgaccccttagataaaatttcatatggtaaaaaatgaccttaaggtgaaatgcttttataggaacaagacacaaaacctttgtctgtacttatgaaatatggcaattaaaataacttttcttggcctctattaagttcaaatgcccaagaaataaactcatagaacattataagccctttccatttctgtgccctgagtcagttctaacactagaaggatgttctttgttttaaaatagtgattaagtaggctttgaaaaaattacagtttaatgaagtcaggtcatagcttctggatacagatggtcaggtttcaattccacctgtgcaacttttgattccaccattgcaagttgtttagtctctctggttttgtttcctcatctgtaaaacaaagacactattattcttcacctcattgagttacctggaggagatagatgctattattttatcattattattatcatatccatttgaaggtgctgaaataaaattctaattttttaaagttctaaatgaaataactttttgttacaaattactttaaatcatcaaaacttagtgtattatactcttcttcttgcctgtgcctagtctggccctctcaattgagaagtcagtctttttttttttttcagtaatccacagtgagcagcagtccctgaacgaaatcatattgctagttgggtttgattaataaaacacagaattggtattctagtcctttcaggggggtttgcttccttgtgatgtaagaaccttgtcttagtctttgtgctgctataacagaatgccacagactgggtaatttatgtcagggttctgggggctgggaagtccattatcaaggggttggcatctaatgtctttctgttgcatcatcccatggtagaaggtggaagggcaagagagtgagagaagagaaggaggccaaactccgtcttttatctggaacccattctccactcctgtggtaatagcattaatccattcatgtgggcagagccctcatgaccttatcacctcttaaaagtcccacctctcatcactgttgctttggggattaagtttccaacacgtgaaccttggggacacgttcaaagcatagcaaacctcaaagcttcctccttatttctgtttgtattaggtatgttattccctcccctcaatctttttttaagggtttctgtgatatcagtgttcagagcatttgtattttgtctactatgtttttatgatattagtgttcagagcatttgtattttgtctaacatttactaccttaaatattttgtcagtataaaatatttaaggttttgctgcttttattactttatgaacacatttgtcaggaatctgattgttagaaagcacattaaatagaattctacttggatgtggaatctataaagagtataataaggttttgatattgaggatgtcagtgtatgaacagctataacaatccacattaatctattttctgtagttgtgttacttctaactttcagactttatcctttctttcatatcttgtgtcttccctaaagtggatccagtcagttttctggttataattacaattgaaaaaaaaaaaaaattcaaccatagttacttctttattcaattacgttgttattgagcgcttcctgtaacatttggtaatgatcataacaagtaacacccaggtacttacaattggccagacattgttttaaatgttttatgtgtatcaacttatttaaacttcacaaaacccctacaaggtaaatactgctgtccccattttaaagatgaggaaactgagacagattaatttgccagtgtaactctgcactacacaatgttgtacaacggtagatgccacaaatatctgctgtcatgaagctcagtgttttattttttgatacctcagagtatctccagttgtttttatcgttagtttcttcatttattcaatataaagacattgcgctagatacagaaaacatggagaaacttctagaagatgacaatttataaggcaagtcaaccatgtacatcattagtagatgtataagagctacatatgccccaaacaggaaaccttttaaatgaagattattatatatgttttaacatactgtgtgtatgtacgtacacacacacacacacacacacacacacacacacacggctatatgtgaatcacctggctttagtctttctttcctccccagttcttgccataattcgagggcttcaagagttcatgcagatgatacttctcacaccttggtctagcagttttctttctttcttttttttttatttaatgaaatttcagtttattcagataaagactaatgtatgcctcataacctagtgataatctataagtttgggagttcacaacatttttacaaagcacataatattaacattcaagtgaggcattatagaaagttttataaagaatgaagtaggccaggtatggtgcctcatgactgtaatcccaccactttgggaggcagaggtgggtggattgctggaggtcaggagtttgagaccagcctggccaacatagcaaaaccctgtctctactaaaatacaaaaattagccagccgtggtggcacatgcctgtaatcccagctactcagaggctgaggcaggagaattgcttgaacccaggaggcggaggttgcagtgagccaagatcatgccactgcactccagcctgggtgatcaagtgaaactgtctaaaaaaaaaaaagaagtctttactataattcttttaaaaaaccttggttcatcttgaaagactgatgaatttttgaaatacctgcagaaaaggaaaataatcccccccccccccccagaaatacatacaaaccacttattggcacttgtgttttaagtacctggagaaaaacaggacagatttttaaaggcaattaataacagcttatacaaggccttgtttcatttgctttagcaccaagtaaagtaagagtaaatatgctgtggaagatggtcaggtttttcctccttctctcatatgccccacttctcctaccaggtcacagtacatcagcagccatccttgttgccccactgaggaatcactttagattccagtatttaaatggctgctcagatgaaaccagtagaattctttccccttaagataaggtggcagtgaatgctagcaggtatcaatttctttgatcaggaacaaagaactccttcagaaaactcacttttttggtctttgttaacctatcctgtgaattctttttattggcacaccttgtttacgaatcatgattgattgctatttatgccaagggaacattccgcaggcatgcctgatctatttactaatgacaaagtatgcttactttacataattccataggttttctcttttatttttgggaggaggggtataataacttgttatttatcagggcagatcatatatttggatcaaaaagagaaactggcaagtagatcctaaaacacatttcttaacccgagtaacatctgaaaacatagatttcaattatattttgttgaaaattcattcaactttggtgcttatccaagaacttataatgtcaatttctgacaaaaattataaccctcaatacatatgtattttcaaaagaagagtcatcttaaagtaatatttttctgtatgttaattgatacatttttatagcaaattgaaaattctgagtaaattgaaagtatgtttaacaacaaaataaatacagcatatatggttagcttatatatttattagtgtaaaggcagcagtgaatttgtatcttacaacaaatctgtgaatccagttgcttttttttctggaattttatgtagtatcaccatgctccacaatgctagaaatgtggcattaatctgcaaaaatttctgatgagatactttccccaaatgacatgtaactttttaaaacttttccaaaaaatatggacattttatcaatcacttaatcttttttttttgagacagagtctcggtctgtcgcccaggctggagtgcagtggcgtgatctcagctcactgcaagctccacctcccaggttcacgccattctcctgcctcagcctcccgagtagctgggactacaggcgcctgccaccacgcccggctaatttttttgtgtttttagtagagacggggtttcaccatgttagccaggatggtctcgatctcctgacctcgtgatgcaccatctcggcctcccaaagtgctgggattacaggcatgagccactgcacccagcctatcaaccacttaatgaacaaaaagttagattactaccaattgttcatttaattttgctctaacgtgttttaaaagttaagacatctctgatggttttgcaggtgactggataaaacacactagatgatttcaaaagattaatcttagtatctgactcgtttggcacatcctcagtatccagaataaaatcagtagaaataaaagtaatataactttcaaagaattcatacatgctggaggtcttaggaaaagcagtttttaaattcaaggaataggaggtttgctcatcttactagttacacacatttctcctcatggagtaatggcagctttctggcttctttgtggaactttagtttgtagaaaagcttggtaatattccaggactggctttgtttgggcttcataagcctttagtcttttgataaccgtctctggtttatcatcctcatgctgaatgagaggatccccagtcagatcatcagtgcccacagttttgggagggttgaattcaatgttgtagactcagccactggcaggatgaatctagcgagcagtaaggcattgtttaatgacctcaaagggcacattcgggctaatcactttgtctgtctaagaagcttagtctagggcttctgcctgtggaagtgtccatggaaaaccacccaacagctagctatactaagtgagatttttcagctcatatagggccagctgagtcatgacatcatctcggatgagtttcctttggtcaatgaaagcgttagctaacacattaatttctgtgccccgcagcatgttgatcctggagcaggtctccgctagagaggtgcttcacagtgtttggtgacgcgcgacaactagtgctgttgcctagcccagggcccccatgatcacggctgctgccgcgtagacgcccctttacagaccaaggcccacgccgcacccgaacaagggctttggcccagcctgtgaacttaccttctctgccgcccaggcccagccagctggcagcgctgctagtgggcggggactgtggctcccaggccttccctgaactctggtctagcagttttcttgtctctcaactttagtggccattggtcactgtactggaaacctcgtgtgtctttctcacatcctcttggcctctgattccagctggtgctgctgggaacagtcggtggctcactcctggctgactgcatgctgcctcaggtgcctctcttttgctttttcccctgcggctcctctaaccaactttcttgtctgttccctcttgtctgtccctgggcacgtgcactgtagttcttagaagtgttagtggagttaatgccctttgaggcgactttttacctatgcaactggagttgatccatttccccgttgactttcactggacagactttctacgtacttctcaaaagttttccacaagatcaagcccccaggtactcagtatggtaaagatagtatctttgtattggctttttctctttttcttggttcactgtcttcaaagtgtctctctcttttcctggggtcaccttccaataaactgcctgcacaccagttctgttcccaggctctgctttggacagaaccctagctaaaacaatgacctggtactgtatttttaatacaggccttttcccccaagactgcctgtctctgaaattgtaaattcttaactgtcgtaggttccagctcttttcacttccttgtttccgtggtcccctctcctctcacctccctgttgtgatgtctggtcttttgactttttcctcttgttaactttttggtagcactgcaccttctttgccccccacccccacctttcctcttgcacctgccctgcacaccagggaatagatttagtgattccaaattggagtctgagggaccatgggaggtattctcagagatttgggcatttctacaaaatttaaaaaaaaatcatgctttcatgttaataataaacatttagtttatctggttgaccatcttataacccagtaatataacttcagaatctatgtttgtacttggaagttaattttggtttcataatgtttaagagctatgagcatgagacattttatatctatctataagttggcttatatacttaaagtaattgaaaatttaagttgtcacttggatgtctatagtaacacttttctgtttagagaagttctgcacattaagtaattctgagacattcttctgagtaatgtcagagaaaaatgtcatacaattcaatatggttcagtgaaaatatttttaattttttaactttttgaggcagggtctcactccattgcccagcctggaatgcagtggtgtgatcatagcttactgcagcttccaactcctggactcatggccccttcccctggcccccacttccaccaagttttgctatgttgcccaggctaatttattttcttgtagagccaggatctctaggtgggcatgatggctcatacctgtagtcccagttacttgggaggctgagatgggaggattgcctgagcccaggaggttgaggctgcagtgagatgtgatcacaccactgcattccagcctaggcgacagagcaagaccctgtctccccccaaaaaaaaaaaaaagagagagagagagacagggtcgaggctagtcttgaactctttgcctcaggcagtcctcttacctcagcccctcaaagtgctaagattgcaggcatgagcctaacagcaaagagttttgagcatggactttgtgccaagtatttctaggtgcaatagctataaataagatacacccaggccctattttcttggagcctagaatccatcagggaagacatgttaacaaatagttagaagtgaaatgagtgttacaaatatgcctgtataaattagggtgtccaatacctggtgggctctcaccattgcaggctctcactgtaatcccattgcatcttcctaattttctgcaacccctaagccgtacctcttttcctaggagttcttcctatttcagaaaaaaacagtcatgcatgaatgaactctctttgctttctcacctcctgctctgccttagaagaaaggcaccatgtctctgtttagggtgatccacccccttgggctgcacatgccatccctctttgctccaaggaggcctggcttcatcactttccttttctcttttcctgtgtcttcacctcttcaagtttgcccccagttctcctttcttcctaagtattcttttcatcccaatcacatccattttcataagttcggttagcacctagattatgacaactctcatgtctgtgtctctaactcttgacttatctcctgagatccatactcatgtcctagcttcccaataggcatcttccctagattttgcaataaaacaaacctcattttttcccctaaccccattctccctcgtacatcttctttattttaaagtgatgattattctaaattcctttctttctcccatccttccttctccaagtaagcagcagatccctcatagctaccttctaatcattgtttgttcgtcttcttgtttgttgctgttatctgaatttagacatttgtcacctctcacttgaacctttgcagtaaattctgtatttgtcttccagctcctgtcttgccccctgtccttttctccactgagtttctgccatgtatatgtagaggtattactagcctgcccaaattttttcagttcccttcctatttatagaatggaatccaaactcttttagcatggatggtatttggctctctgtaacgtagctcttcctgcttgcttggtcttcgttcctgttatttccaactcataatttaagtctcagaaatacttcaagattccttttggcctttctgatattttaagattttaagataatataacttatacttacaatagaaaattataaggataaaataatcactcattccaccaacaagatatagttacaaaaacatacatttttctagtctttttttctataaagagagaaaaagtgagacagttccaattttgggttgcagggagctgcccaaatgcatatgcttagaaataagattaggaaggagttattataattcgcctcgggacttcatggctttgtatatgcaggccttttgcttggaatatcttctctccacttttctccacacccatctcctatgtgccttcaggtctaactgaaacactgccatgtgcctgatgcctctgaacttgtccaggcagatttcagtgtcctcagtgcactgtgtccttgtttattactgaaaccatcatatcataataatttgtatttttgtccttgaactgaaagttccctgaagcagtgacccttgtatttcctgatatggctcaaaacctgacagagttgtctgaagaggaacctccagaaaggcagggggaaaccagtagagttcaagggagtagagtgtgttaaagaatggtgaatagtcttacatgttgctttgtgtaaattctttggtagtaaaccgatgtacttcttcaagtgcatattgtagtgagtcaaaaaatttgtgaatgaatgagtgatgaacgaatgaatgcagagagtaaggtaaggcctagaaagggttcttttgcaagagtaatttcacatatatggttgggcatggacatcagttacacagttatgtgccacataatgacttttcggtcagtgatggaccacatacacgacagtggtcccataagattataacggagctgaaaaacacctgttgcctagtaatgtagtgtcatagtgcaacacattactcacatgtttgtggtgatgctggtgtaaacaaatcgaccatgctgccagtcttataaacgcatagcatctaaattacagtgcataatacttgataataaacaactatgttactgctttatatatttactgcactatattgttaatttttttttttttttttgagatggagtctagctctgtcgccaggctggagtgcagtggcgcaattttggcgcactgtaacctccatctcctgggttcaagtgattctcctgcctcagcctccagagtagctgggactacagatgcgcaccaccacgccaagctaatttttgtatttttttgtagagacggggtttcaccatgttggccaggatggtctccattacttgaccttgtgatctgcccatcttggcctcccaaagcgctgggattacaggcgtgagccaccgcccccagcctgttgttatttgagagagtatctctccttacagaaaaagtaaaacagcctcaggcaggtccaggtccttcaggaagtggtcccgaagaaggagatcttttaggagatgacagctccatgtgtcattggagacaggatatgcaggcgcaagacagtgacattgatgatcctgacccagggcagctgtgcaggctttaggctaatgtagtgtgtatttgtgtccacagtactgtgtatagtaatgtcagtaatgtcctgttcagtgtgtgttctgtgcagtgtactcacttgcccctctcactcactcactcactcactcactcactcactcactcactcacttacccacccagccatccagagcagcttccagtcctgcaagctatattcatggtaatagaggtgcatcaattttaaaatcttttgtaccatacttttactgtgtagtttttctgtgtctaactgtgcgtagatacacacatgcttactgcagcattccagttgcctgcagtattcaggacagtcttgtgctggacaggtgtgtagcctaggggcaataggctgtaccgtagagcctggatgtgtaggaggccacaccatctcggtttgtgtaagtgcactgtgatggttgcacaaagatgagattgccttcgcatttctcagagctctttctttgttaaatgacacatgaaggtactgggttgaggagagggaaggtaggtaggaaatggagaccagtgtagacaactgtttctaggtctttgaccgtgaagaggagacaagcgttagaattaggacagcaactgaaaggcatctttccctgttatcccctcatactctgttttatatggaatgccattgggaggaaaccccttcaggtccttttctcagcataagaatcacctggagtccaggccccatgctcagggattgtggattttaagcctagggcatccaggtaaacccaatgcagttgttctctaggcccacttagagaagtgctgtcctgggagctttgtggcgtaggacttgggcacctgttccttccccttccatgcgcatgtgcagggggcacccagtaccggtagaagggaaggccagcagcattgaaagcgaggctccctggccctctgcctctcctttcctgtccgggtctctgtggcttgcttccctcaggccacttctaactgtggtctcctctccgccccctggtcctgtagctcttctgtgttcttaattggagtcatcctctagcctttccctttccctgagagaaagcctcgccttttacagatatcactagccaatggcagtgcctctctgtttcttgccagtgccccgccagtcgccagtcgcaggatcgttgacatctgtcattaaactgtttccagctgctggccttgttctctcagctgttcttcaacactgaagccttgtttcgcctgcttccgggtttggagctcttccggaggcacaagggtttcagaaggttgactttttgccttgtcaaggtttatagaaggaaaggacagtgacatttaaagtagtgtggctccgaatgttaggaatcattttctgttacctaataacttcatcttagtggtgattgtctaaattgtatgatatgttgacagatttctcaaagcagtctctagtgatcattaaacagcctgagttgtatcctgaagaaacatgtatctgtccatatatggaacaaatatttgttccattccctttgtgtggaaactgcctgcatgcttcattcatcacagtaatgcatttcctcaggaacttttaatgtttcaggtgtctgttgtcatagctttggaatcgtgataacattatttgacttgcttagaattatagtctaatggatttactacacactaaaccttttagacaggccttgaaaggtgaatttggtaggcatttcacacttctgtgacactcagattttgctggtctcttggatacagtcacaagtgatatgtaagcaaaactgcaagctcaggcataacagcctgctgggctgagcacgattgcagaagtgaatgacttttcacgttacgcttaactcttttctctcgggtgctcagagcacaacttaaagcattctctctgagccaggggaatagcatcctggaatgtaagcccttgaagatggaggtctgtaaaagaaatattcagtgttaacttggaattcagtgaacttttttcatattaaaggaaatttgtcaagaaaaataattgcacagttaaattgtgctacagttgttttcattaagaaagtagaaagaagaccctaacagtttaaaaaacaaatggccctcattgtctttatattgtgcatataactctttgttatcttcagattatatgaaactattagtattatttttatattcttctcatctttttttcttttgccttgagaaagtcacgttcttctcattgtgtactttacatccaaaattattttgtaactcttttttttttttttttttttttttgagacggagtctcgctctttcgccaggctagagtacagtggcgcgatcttggctcactgcaacctccgcctcccgggttcaagcgattctcctgcctcagcctcctgagaagctgggattacaggagtatgccaccacacccagctaatttttgcatttttagtagagacggggtttcactatgttgtccaggatggtctcgatctcctgacctcgtgatccacccgccttggtctcccaaagtgctggattacaggcgtgagccactgcacttggccctctataactctaaatgttgctgcattttattattgcaatgactaataagtccctaaacttgatgcagttagatttccctgttattggatataggatatttacatttttgctcttgtgaatatactagagtactatactgaatgtgtgtgtatatgtgtgtcaccttttatatatttaagtatttccttagggtaaattcccagtagctggattattagagggtagaaatttttttatggtttttgatataaattgtcaaattatttcccaaaaagttgtatcagttcacagagctaccagttggtttctcgcagccatctgctatagttttgttgggttaaaaaactttctatttttgctagttcatcttatgttgctttaatttacattttccaataacgattaaacctaaactttttttgtataaatttgcttttttgagtatttcttcttgtggagggacagatacttatatataattattagattggctgctagtccaagagcagtaagtagttaagggatcaagtcagcaaccagtggccgtagccatctttgaccaatcaaagatatagattcatatcatcgtgaaagctttgattcagagaaaatagttatatatgtacctaatggtaggaaattggggtagttgtatttagtatatagaatattacctaattttttggttagaggttctagaagacaagactttttcagtttgtcttatgccctctttttttttgttgggggagaggtggggggtctggacactctaggaaattaaaactgagtattttacttattgcatgcatagaagttgattttcttttcttttctttctttttttttgagatggagtcctgctctgttgcccaggctggagtgcagtggcataatcttggctcagtgaaacctttgcctcccaggttcaagcagttctcctgcctcagcctccggagtagctgggactacaggcacccacgacgatgcctggctaatttttagtagagctggggtttctccatgttggctgggttggtctcaaactcctgacctcaggtgatctgcctgcctcagcctcccaaagtgctgagattccaggcgtgagccagcgctcctggcagaagttgattttcttaaaaaagagagataataggaaaacaagctcaaaaatctatttggggccttatgcaggatgttggccttagcctgaagaaataaaaactgatgaagcgcattgttagcagagggatgacttgatcaggtttttgaaaacgaatgttcagcattgaggtaactgaggcatctggatatgctggtctgggcccctgggagccgcaggagataatggagatagagattctatgggctgagaccattggtaggttttatggtgttgaggaatacttaacactgattttttttttgagcgctgttaattaaatgttaaaatataatcggtttgctttagagaaaggcacgaatggattctggggctctggtatggaagttattttcgcagtgtaggtgcaaggtgagggaaccagatagggaggggagatgggcgagggtctgtggagaggggctggagtgaaatggtttgagagccatcatgtttataaaagcaatagaaggtacggtggggtaatactttctatttaatgcatttttcattttatttctttataactaatataaggcacattttacatttcagatgaatttacaaccaattttctggattggactgatcagttcagtttgctgtgtgtttgctcaaacaggtaaaaacaaaaaattttcttagttgtcttttcatttccgtatcttgtattgcgctttgaccagttaggttcatatgagaacctaagtcataatcatgctgctccttctggaagccctgcaattgttcctcttactcagagaaaggtcaagttccttcatggtcaggctcccctcacccctgccacctgggatgatgggaggcaagttggctggtgaagtactaaaatgctagggattgaacacactgcaagaagatcttttgagaacatgagagtgtgtaagtgaacagaaggcaaaagcaagtatatttagaagcaaatgaaataaatgtgtagaatggaggattatgaactgtccattattatctgcaaagactttctagaagacattctcactctttgataaaaaagtctcacaaaatgttggcatcatctaggaaagcagtgaaaataaagctgaaaatgtatttaacccttctataaagatgtggctccacatctggaataatggatacgcagttctgtcctctgaatcttgaaaaactacactgcatagagcagttcgatatcaggattggaaggacttactacaagtagtaaaaatgaagcaggagaccgtaaaagaaagtattgataagttagttacataaaatcagtaataacaaaaacattctgtgtcagaacaccgtaaacaagatgagaaactaaacaaaggttccacttcattaatgtgtatagaaatccaataaaaactgaggaacataacaaaaaaatttgcaaaagacataacaaaattataaaagaaatggttagtaaaaatatgaaacaatgtaaaacctgaaattgataggcttcaccaatgaattgatattctaatttacacttatgaaatgagcaacagttttttaacattaaagcacttcggttggaaatgtggtaaaatggtatttgtacactgccgttttgtgggagcttatattagtagtgttgccctatggtatccatggggaattggttccaggacctccttcagataccaaaatccacaaatactcaagtccctgatataaaatggcatgatatttgcatataacctacacatatcctcctgtatactttaaatcttctctagattacctgtaatacttaatacaatgtaaatgctaggtaaatagcttttacactgtattgtttagggaataatgacaggaagaaaagtatgtacatgttcagtacagacacttttttcccccatttttgatccgtggttgcttgaatccactgatttggaaaccacagacacagagggtcaactgtatattacttttggatagaaattagtgtgtatagagaattttagaaatgttaatatgctcttcaacttagtagttaattattcttttaggttttattataaggaaataatcagatgtgtactaaggtttatatataagatcatcagcatgtgtatgtgcatgtagtacagtatgtgtatatgtgtacttggggtgtttatatgtgcatgtgagcaagcatgtgtgaactgtgcacacatacatttggaaacaatctaaatttgtccagcattaaatagagtacacttatattgaaatacataatcattaaaagctttttaattctttttaaaaagaatttgtgatgataagaataaaacacttaggataaggtataaaaaacagtatacaaaactgtacaactgtatatataaagtgcatcctcagtttcatgtaaataatacatgtattaatatatatatgcttgcttccccttgctatttatctgcataggaaaaagactggaaagaaataggcaaaaatgttagcaacagtcctctctcagttaacagattcagtgagttggttctttatgctcttgtgtgttttccagattttctataagaagcatatgctggttttataatctcagaaaagatacgttggagacagtctgtattagcgcttaccatgtagaaggcatactcttccttaggtagatgcaaagaaacctaaaacatactttgaacatagagcctgagaaattctgggattatggattagatgaatatggacttttcagttatttaacatactgaaagcaaagggaaagccttgaagattcttgtgagtatggtaggagttaaatgacaagaaataatactttgcccagttttaagagaactcatgacatttatgacagtcaagaatgataaattctgaattatgtcttgtctttgatacagaagacaaggaagataacttatgtctctctgtggctttcagtgtcaaggtgatccaaaatcacggtcccaaattttgcattgttctcaccggtttgtgggagctaaaaattaaaacaattgaactcatgaagatagtagaaggatggttaccagaggctgggaagggtagtgagaaggtggggaggaagtcgggagtgttaatgggtacaaaaaaatagaaagaataagtatgacctagtatttggtagcacaacagggtgactgtagtcaataataatatagttgcatattttaaaataactaaaagagtataattggattctttgtaacacaaaggataaaggcctgaggggatgaataccccatttaccattatatgactgttatgcattgtatgcctgtatcaaaatatctcatgtaccccatacatgtatacacctatttacccacaaaaattaaaaattaaattaaaaaatcctgctctctttggggaaggtctagtttagatggtaactaggtcatagtattaatatttaacatatgtattgcattgtcattgtgattctgatttttcattattttctctctgacacttcacataaaatgttctgttctttcttctttctgacagatgaaaatagatgtttaaaagcaaatgccaaatcatgtggagaatgtatacaagcagggccaaattgtgggtggtgcacaaattcagtaagtaaggttgctcaagtcctttccatttgttctctggtcatttagtgtggctcagtgctgtatccttcagaagcacatattaatttttatgtaaatcataaaatgaataacctaatggtttggagctatgtggttcaacacagtagccactaggcagatgtggctattgagcacttttgtacaaattagaattgctctaagtttcaaagatatacaagatttcaaagacttagtattaaataaataataatggtgaaatgataatttttgtatatttaaaaataatgttataacagtgttaaaattttctctttttctttttttagtgtggctactaaacaattttaaaatacatatatttgtagctcatctttgtggcacatattagatttttatgggagaaccttcaaaaaaatcctagtcatttagtttgactgtttcagatttccccttttttgatggggaggtataaattaaccttcttaattatatttgagttaaactactggaattgatttgcatcccaatataagcttattgaggttaattagggtttggattttattcacttttgtcatctctatacttttgctaatatggtaccttccacaaagcctactaaatgttcagtgagtcaatgaatgaatgaatgaatatatcaaaagagaaggtaaggagaagtcattttgaggttgtatagtttattcacagaatgaataactaatatcagaagatcaaggggttactgattttgttttcatgcaggcatttgggcccaagtttcaagtgcctatttttgtatgcctaagtggtcaagtgtcagatatgtcgtatggtttgaccacatgaaagaaaaaatgagaggttttgttgtttttcaaaaattttctaatggtgttttctaaaagtggtgtgttgggattacattggcaacagtggaggaaatatggagtgttgtgagtttgtctcaggcaaggcttatgtaactgaagctcttggttttcatatctgaaaatgaggatgataatatccgctttatctattgttacaataattagaattgatgaacttaaagcagtttcacttaaaaacttctaaataagtggtagctgctattattgttaacatatccattttatggggactacagtttatctgtagttaaggattatcttagcctttgagctttggagcataatccttaaaattttaaaggctttctgaatatattcagtgaaattgtatttgggtgtcatgattgtaaatttcgtggattgattagtatttagaaatgtgtaattcactaggatcttgtgctttggtaggtagtagtttaggtttaataaatagtgcagctttgaattatctgattcttggtattcccttccagttgttgattacataaatactctcattagtatgatgtttctcttaaaaaatcttatgtaaaaactattgtgtattctttaaatttaaatatcttcacttactgttactttatacagcaccgttaaattgatatttgataaataaataccatatataatgtcactgtttcccccacattttcacatttcttgaaacacctttattcacagtctttatatagatctttaacagcagtgtttttgaattcactaaggcacttttcagttatatgattaaatttttatttctaagttgtttgatgtataccacatttaaaatctctgtcattactagaaattttactactgcaaatatccattcacctgccattaagaactttttttccttttttgaaatttacctgccattaggaccttttacccttgtcatatacttactccttttacccttgtcatatacttactattttgctttttaaaagttttttaaaaacttatttacaataatagctaatacttaaagttttttcaaacctgtgggaatacttatttaatcggtgctaaatttcgtgttgtccttttaaaaaatgcaataattaattgagatgtttttaagctcgtctgttttccctaaacatcgggttgttcagcatattgcgatggggagagtgccacataatatgagacgctttgtaaggacttttcaaagggaaattttggagaaatgatctgatatttgggtgtatgtatacattattagtagccattaaccatgctcaattagtgatttcactaaagaaattgcttttgattagatactctgaattacaagatagagcatttactgtgtacacttgggtcagttctgggaaaggtattactttcttggaaatgattgttttttaacaagaacacttaccacagtttggatgaagggagcattttgtttaaaagccagaattggggtacattagatgtgatttgatgttttgcaatttaattgcttatttgcaattattatgtaaaaaggtttgaccattacaattttcatttatacctatattttatatgtcatttagacatttttacaggaaggaatgcctacttctgcacgatgtgatgatttagaagccttaaaaaagaagggttgccctccagatgacatagaaaatcccagaggctccaaagatataaagaaaaataaaaatgtaaccaaccgtagcaaaggaacagcagagaagctcaagccagaggatattactcagatccaaccacagcagttggttttgcgattaagatcaggtatggaagcccaactctgtgaatacctgcgtgtttacttgaggcattcgacaccagctttatgcaaactctgaccagtttctgttgaaggctcgtttttacatgtggactggcactcaaaaatgtggaattgtttaaattttagaaaatttttgcagatataacaattgtaagacatatttacttggaataatattaaatgttgcctaatattcaaagtaaattttgttaaagattcagaaagtattaattagctttagtgagttttaaaaatgaaagtgttcatcctctggtctaattacataatatattataaaagcaacattttaacctgttcttttcctttgtatttgtttagtattattaaactgttaaggtttttgtaattatgtctgttagtcccacatctaaacatgaaggaaaaaacaagccctcatcctcgcttttctggtttccgacctttcttgtcaggagaatggtagagtggccctgtcccctgacttccctcccggcccctcctcaaccaggtcagccctctcctcctcatcctgctctagcaaagctccaccatcgccttcagcccgcagacccaggggacccttgtcaggattttttttaactcttctgtaccaagtaacactttgtactttttgaaatgctctgtccttgatcaatgataccactcctcggtttttctttgtgtctcttaccattgccttccaggcctctttttgtgtcttttttcttcctccctttttgcagtccacctaaatgtcagttttcctctcgtggctttaaaacccaattgtatgctgcagcaacacagacttttcttgagctccaaacccatttctccaattgcctattagaaatctatatagagaaaactacaagttaaaattttaattacattttcatccaaacctctctcctgtatttcctaagtaaattacattaacgtctcttgtatctctctcttctcctccttcatcatctctctctgggtttcttttgtagattagctagtctctttgcctcataatgataataaaaataaaataataaataataaataataataaataaataattatttttaaagctgtctgccaggctttctaaagtaaagatcggatcatgttattcacttgcagggagtggcatcccactacacacagaacagagttcacaacttcagtgtctaaaaagtcagttgtaccctatcacgtgttctgccttgccctctccagactaatttatggtgttctatttgttttcttctcttataaactgactttttgtctgttttgtccactgtggattgggaatatcttttttatctttgcatcctgaaggcctggtgtttaaagtatttgttgaatgaaactgaatacatacccattgagttacttatggaattcccaggtttttgtaaaaattatgacaacatgttttattttattgtgtttaccgtgtaaaccacatttatttggtttttctcgtttgcgtttgattgccaacaggcaagtttcattttctaatctcttgtctaattaggggagccacagacatttacattaaaattcaagagagctgaagactatcccattgacctctactaccttatggacctgtcttactcaatgaaagacgatttggagaatgtaaaaagtcttggaacagatctgatgaatgaaatgaggaggattacttcggacttcagaattggtaggaatgttgggaacattgaccattttcattataaagtcttggcaattctcaaatgttgttttatattttattcctttgttactcacaacatacttgtgagataaacaagccagttttttagccttttctgagtggaagttgatattccagtcacacgtttaataatcttttctgccaccttgttcctctgtcactggatgctactgtttgacacagattgtacctcatagataatgacttgcatgcttattttcatactaacttgatcatttatcttatgacttactttattttatttttaagagtttcactcttgtcgcccagactggagtgcagtggtgtgatctcggctcactgcaacctccgcttcccgggttcaagtgattttcctgccacagcctcccgagtagctgggattacaggcatctgccaccacccccaactaattttttgtatttttagtagagatgggggtttcaccatgttggccaggctggtctcgaactcctgacctcaggtaatccagctgccttggcctcccagagtattgggactacaggcgtgagccaccatgcctggcccttatgacttattttataaacatgtgttgaatacccagattttatctaattgctaattagtatgtctgcacctgcccgtacagcctgatctcatcttagacctggatttttcatatgatgatgatctgctttccaaaccttatttttcccatttcatgcatccccagcttaacctcttttttgcctgcttctctccactcctgttgctctagaggtttagcaacagaatattagaaagatttgacagttatgaggcctaagagctgcctttcaaaaattagccctattttagtggaaacatttaaaaatagcacttgcttaaaatgttcttttattctgtaagcataattcaaggaccatggcattagggagctcctatcaaattagtgttttttaaaatggccagaattctagaatatttgtttattcatttgttcagcatgtcattattgagagctggtgtgccaagaaaatgaatgtgagttatttttaaagtagggaggcaaaataaaaagattgtcttaggtcttagtccatttgtgctgctttaagaaaatactataaactgggtggcttatgaacaacagaaatttatttctcacagctctggaggtgagaagtccaagatccaggcagattgagcatctggtgaggtccctcttctgggttcatagatgataccttcttgcgatgtactcacatagcagcagggagacagcagctctctggggcttctttgatgaggtcactgtaggagtctattcttacgttgctataaagacatatctgacactgggtaatttatgaagaaaagaggtttaattggtttacggtcctgcaagctctacaggaagcatggcgctagcatcagcaaggcctctggggaggcctcaggaagcttccaatcgtggcagaaggcaaagtggggagcaggcttctcacatggtgggagcaggagcaagagttggggagagatgccacacaattttaaataacagatctcatgagaactcactcactgtggtcagaatagcaccaagccatgagggattgatctgcccccatgatcgaaataccttccaccaggccgtaccttcaacattggggatcacattttaacatgagacttgggcggggacagatacccaaactgtatcagttactaatcccattcatgagggctctgccctcatgatctaatcaccttccaaaggaaccacttcctaataccatcatgttgggaattaggttttcaatgtaggaattttggggtaacacagacattcagtccatagtaacctacatttggtaacatagatgaattttttaaacaatgcaaatctctgtctttccatctatccatccattcattcatttatgtaccatttttttcttggcaggatttggctcatttgtggaaaagactgtgatgccttacattagcacaacaccagctaagctcaggaacccttgcacaagtgaacagaactgcaccagcccatttagctacaaaaatgtgctcagtcttactaataaaggagaagtatttaatgaacttgttggaaaacagcgcatatctggaaatttggattctccagaaggtggtttcgatgccatcatgcaagttgcagtttgtggagtaagcgcattcatttcctatcaggggatattgtttctattatgtgtgtgaattttaagtgtgattttactatgataatagaaaaattgaccttaattttcatagatttgattatcttagagaagtaattttaagtaaacccttaaattgcctgtatacataaagtgcctttataaaagcatatttaatctttatgcaaaccacacagttagtttattcatgcgggcttttaaaagacagaatgctaaccatttgaaacagcggggcaacctctctgtactgtagctggtggtctggattttagaaaagcccatgtgtcctaactttctggctttgtactagagatagaattgatgttattatctgaggcatcaccaggaaccttgaaattgctcaaagggagagtgtcttgtatcattttcctttggtcagttttcttctcactgtctttgaaagacacatctttctcctgtgtcttagtaattcaaaaagagagaactttttaagctctagtttttaacctatatgaatagatgtattttgagaagtgatacaatatttgtaattttaattgtaagattttcagtagcaagcccatccctattggttcaataatttgtattttatgatccatgtagcagctatgtattttgagatgacactttaatgatgtggctgaggctgaaactagaagacattgtcatgtcaagtttgtcctgcgtacctactcttgtctcatttttgttccctccagtgcccccattctctagatgaccttctttgattttagaggcctcttagtggttatttttcagtcaatttttgctaaggtgctaattgatgcccaaaataataagtgaaggaatatggatagtaattaagaatttttctatcaccactgatgctgggcaatttactcagcctctccagggctgttttcttctctttaagaagggatcatgatagtatctacctcatagggctcttgtgaagttaaaatgcatcaatctctataaagtaccaatgagcattcagcaaatactaattcctatattgttattactttcgacttttcactagagtgtttgcaatttaaggttagtccctgctgttatagccgaagcaagtagcattccaggtagtacctagccttacacctcttttcttactagccattgatgtgtgagcctgttagcagctcgttgtggggagggcattctctgggctgcctctaactaggccttaacctgtggtattaaacaagccataacacccttgattgtggctgtttttctgtgttggtcatgctgatccactcctctagatgcaaaagaatcagacattccacttttgaaagattgccagtattaataaatgtgattcccaccttaaagtattttactgtcttatgaagatctaaacagacgtattaaataaattaacgaaagcaggtaaattcctatagtcctatgattttataattataaattaccatagtgacaagaagattttacagttactttagattctttattggaaagggcaaggataaagtaaatgagtgcataaacagtactgattgaggagttagaatgggtgaaattatccttaaacaagatacttatttctgttataaaaaaaggaagcctcatatggtgggctgataaagaaggtgcatggcatagaacatagagcagagatgggtggatggggacaagacagcagcagtggggtaaagtaaggataggctcagacactttcatttattcagcaaatgctcatcaagggcttactgcttgccaagcagtgtgctggcttgctagctgctggagatatgatgataagcagaactaaaccaaaccaaacaaaacaaaaaaacagtttttaaaaagaactgagagattgagagatacggatggtcaggcaagatatcgttgtacatgggatggaagagcttcattcagtgggctttgtgtgtttctcagcaagataattaccattgtataaagagaagacacagaaaatacagaattaggttaaaaatacaatggtggcctatatgaaaattaaaggatttttgttgaattactgtgaatagtgttttaaaattgaaatccttttcttttcaagtcactgattggctggaggaatgttacacggctgctggtgttttccacagatgccgggtttcactttgctggagatgggaaacttggtggcattgttttaccaaatgatggacaatgtcacctggaaaataatatgtacacaatgagccattattatgtaagtgcctggttccttacatagtgaatgtgtttatgttggattttaatgtttaatactaagagcttgtgggtgactggcttggggtttctcagggtttgaggttttgctgttttggtaagtaggggtcctgattgaaagtgcaggaaagctagtgttgctgtttgtgaagatgcagctttgtatttgcttccttctgctcagacaagggcctcactggggtgggaaagggatgcccagatgccactttcactctttgcctcaactccccgcccacagcatttggtagcacagtcagtactctttctaaataaataatttatctagtctcatactctttgttttatacgatttttaaaagcagtcactctgcctttattgaaaataaatattggcaaagcattcaagttctagaagaaatccaaatggtaaatcttggtctttttcttaagttgtagataatagaatatttaattactgactattctttaatttcattgtccttatatttaatatacatagataaacttactatttaaaaccttttgaatatggaattttttattcatacatgaaagtaaagagaagaggattagcaattcatgtatacacacgactcacttcagcagtttatatttgatactgttatttgaaagcagtcttgtaatctagttatatgtatgcaactagatgtaatctagctatatatggattatatatgtaatctagttatctaaagcagtcttgtaatcgagttatgtgtaatcttgcatgtataactagattgaaaaattagaagagattataagggtgtatttaaatactaaattatattacttgatttcttaggattatccttctattgctcaccttgtccagaaactgagtgaaaataatattcagacaatttttgcagttactgaagaatttcagcctgtttacaaggtaaatgtgtgagataaaaagaacaagattctaaacatttttgattgttagaggcaaatcatgtctgaattgaaatgtgggaaaatgccaccagataggcaaaccgaattttacaaaagtggtttatattaatttttaatcacatattataaaactggtttctaggtttgactcctaaagttagttaggaggaaacatgggaactggcatttaaagataaaagttgctcagtggatcctaattggttgaatgaatagcagttgtattttacgtgttttatcttttaattgcaggagctgaaaaacttgatccctaagtcagcagtaggaacattatctgcaaattctagcaatgtaattcagttgatcattgatgcatacaatgtgagtacatcttaaataagatcagttttggacaataccctgttgagaatactttgtacaaagaaagtaaaacttccttcatacacactttagcgagcccaaagtactacagaaaaacttaaattctgtatgtatctagaggaaaaactttatacatattgtcttacaaaagcaagattcatggcctaaacaaagtgaaaatgtgataaaggcatgtggggagtatttccaaataactgtttgtttatcattaaggaatagatctccttgttagaaagcaattgtaaaacataacttacatttaaacttacaggatttctccaatctttttcctccccaaaatatcctttatagagtcatctattctgatgaattgtgctagaaaagtttttttttttgccaattcttctcttcccatatattcagaggatatgggtttctatttcaggaggtacacactcatatatacgtataccataaaatatataaaaatgtaaatatacatgtgatttgcctatttcaaaaagatttatagtgttgttttcccctcacagatgggaggaagttgaattgaaattaaagaggaattggcttatcctttttgagcataattcagtgtactttaatcacaccgagttagccttcattaataatcatttaaataatctgaaggcggttgtaatttggtaggtaacccttgtgtgtctcgtgcaccactttcagcccccatccccctaaccctttggcagcttgaattttagacatttttacttcatgtcatgggggtaccataacgctttggaaaggccagcctaccatatgaggcttcccttttttatggggtaccataatggtttggaaaggcctgacttggaggggtttttataaaggtttttaatattttacttgttccacagcttttcccattctcccctgtcttagataattttcctaactcttgttctttcaggggtgtgaacaagagatagcttgccattgtacccttctccatttgtcctgaatagtctcatatgttaaacaagccctggcttgaatccttccttcttgggggattttgtttttttttttttttggctgggctacaatggttccttaagcaaatttgttcctagactgcatagttgattgtttaccctagtccatagttagctggagaggtaggactacagaaatgccattttgccgatggggaagacagcatttatttcgtttttttttggggggtttctgtttttgtttttgtttttgttttttagatggagtcgcactctgttgctcaggctggagtgcagtggtgtgatcttggctcactgcaacccctgcctcccgggttcaggcgattcttctgtctcagcctcccgagtagctgggattacaggtgcacactgccatgcttggataaatttttttttttttttgtattttagcggagatggggtttcactgtgttggccaggctggtctccaactcctgagctcaggcagtccacctaccttggcctcccaaagtgctgggattacaggtgtgagctaccacacccggcctattccacatttttaagactcctcctaattagtaacagccctctgcactgtgtgatcctgagtattttaactcagtgattaaaacaggaatactcttttcaattgtgtattttattttaaagatttgatccttattaattaaaacctgtttctctggcctctgtgttttctagttactcaattggatttggcttgtagatactttattgaaatatatttttttctgagcagtttatccattggttttatgcattcaagtagcattttgtttgacttttcctgtgtataattaggcattcttttagtccctttcctcagaagtcattttggaaaacggcaaattgtcagaaggcgtaacaataagttacaaatcttactgcaagaacggggtgaatggaacaggggaaaatggaagaaaatgttccaatatttccattggagatgaggtatgttgtataaagcattttctgtagaaaacattggttatttataagcaaatttagtttatagtttgagaaacattaaaataagtgagcaactttttgaaatattttttagtagatttaaattgtttagttggttgttaatcttttttttcccttcaaggttcaatttgaaattagcataacttcaaataagtgtccaaaaaaggattctgacagctttaaaattaggcctctgggctttacggaggaagtagaggttattcttcagtacatctgtgaatgtgaatgccaaagcgaaggcatccctgaaagtcccaagtgtcatgaaggaaatgggacatttgagtgtggcgcgtgcaggtaagctgggtgttgtcagacagtgacagagctacattggtttagagagtataggcaggtcatattttgggacatccagagaatatctctctatttggagcaaattattttttccaaccacggttgctcaccacaagatcagtttgatgatcttgtgtgtgatatttatagaaagttccttcctgcctttttttcttaaagtgattactctttaaaataaaagattttatagccatgaaagaagtatattcaacaaattgttaaggtagcgtttctctcatgtgagagcaatcaattttctagaacaaaataagcttgtgtaaaataacgtttataggaaaatgttttggaaaaacatcaaaccgatgatggcgatttcgtctgggaaatggaattatgaagcagtagaagatgtttgtcttgtactacatgtacttctgcattgttggaataatttttaaaaaataaatatgtgttgtaaaatacaaaagagaaaatggtattttcagtatgtagaatctagtactaagaaaactaacaaaattacttcagattttattttcacactgtggttactttttgtaattgaaaatgaaaaactgagtatacattgaataccgctttctctgtaaaagaataggaagagggaagagtgtttaatccagtgtcagccccaaaagactaggcttagaaggctattgactatgaaagaaatatatggctttagctcactatcaatttttaattgtctgtgctaagtaacaatttaaatgttagagtttctttatcttccatgttgtacatatcctgttttaatcatgcaggtccatttttagtaaaatgtcatttaaccaaaaagattatcttgaaaatactttgcctttctttcctttatatttttaccagatacagaatcagtgcagtcagtgtccatgagcattatgtgttctaaaaatacacagggaacctgaaaagtctgcacatgtaggatatatttatttttaaatagtatactagttatattttaagtggtatacacagtatgttttttttcaacttccatacacttttttgcatgtgtttattgtatttttttaggttaacagaccattgctttaaatttagacagttcacctggaatagtaaatgtaatagcataccatttgaaaatgtaactaacgtgctctttaaaattaagtttattctgcctttccacatgtgtcattcactattcattgctagattacatttttgtcttgaccaaaatggttactttcctgaagaaatttttttcctagactcttgcatatattccatatgaacttgagtggctggaatgtacatgtgcgcctgtgtatgtttgtccctgcttgcacatgtgtgtacactttactacacgactgtgacttgtggcatggacactcccacctaacagattaggagcttgaagagattttttatagttttattttctttcccagtttttcccttttaaattattattattattattccctccaagatgattcttcttcttttttattatactttaatttctagggtacatgtgcaaaacgtgcaggtttgttccatatgtatacatgtgacatgttggtgtgctgcacccattaactcgtcatttacattaggtatatctcctaatgctatccctgccccctacccccaccttatgacaggccccagtgtgtgatgttccccaccctgtgtccaagtgttctcattgttcagttcccacctatgagtgagaaggtgcagtgtttggttttctgtccttgcgatagttttctcagaatgatggtttccagcttcatccatgtccctacaaaggacgtgaactcatcattttttatggctgcatagtattccatgttgtatatgtgccacattttcttaatccagtctatcattgatggacatttgggttggttccaagtctttgctattgtgaatagtgccgcagtaaacatacgtgtgcacgtgtctttatagcagcatgatttataattctttgggtatatacccagtaatgggatggctgggtcaaatggtatttctagtcctagatccttgaggaatcgctacactgtcttccacaatggttgaactagtttacagtcccaccagcagtgtaaaagtgtacctatttctccacatcctctccagcacctgttgttttcctgactttttaatgatcgccattctaactggtgtgagatggtatctcattgtggttttgatttgcatttctctgatggccagtgatgatgagcattttttcatgtgtctgttggctgcataaatgtctccttttgagaagtgtctgttcatatccttctcccactttttggtggggttgtttgattttttcttgtaaatttgttggagttctttgtagattctggatattagccctttgtcagatgggtagattgtaaaaattgtgtcccattctgtaggttgcctgttcactctgatggcagtttcttttgctgtgcagaagctctttagtttaattagatcccatttgtcaattttggcttttgttgccattgcttttggtgttttagtcatgaagtccttgcctatgcctatgtcctgaatggtattgcctagattttcttctgaggtttttatggttttaggtctgacatctaagtctttaatccatcttgaattaatttttgtataaggtgtaaggaagggatccagtttcagctttctccatatggctagccagttttcccagcaccatttattaaatagggaatcctttccccatttcttgtttttgtcaggtttgtcaaagatcagatggttgtagatgtgtggtattatttctgagggctctgttctgttccataggtctatatctctgttttggtaccagtaccatgctgttttggttactgtagccttgtagtatagtttgaagtcaggtagcgtgatgcctccagctttgttcttttggcttaggattgtcttggcaatgcaggctcttttttggttccatatgaactttaaagtagttttttccaattctatgaagaaagtcattggtagcttgatggggatggcattgaatctctaaattaccttgggcagtatggccattttcacgatattgattcttcctatccatgagcatggaatgttcttccatttgtttgagtcctcttttatttcgttgagcagtggtttgtagttcttcttgaagaggtccttcacatcccttgtaggttgtattcctaggtattttattctctttgaagcagttatgaatgggagttcacccataatttggctctctgtttgtctgttattggtgtacaggaatgcctgtgatttttgcacattgatttttgtatcctgagactttgctgaagttgcttatcagcttaaggagattttgggctgagacgatggggttttctaaatatacaatcatgtcatctgcaaacagggacaatttgatttcctcttttcctaattaactgatgggcttccctttgtgggaatattgttatgtgttatttctttctcctgcctgattgccctggccagaacttccaacactgtgttgaataggagtggtgagagagggcatccctgtcttgtgccagttttcaaagggaatgcttccagtttttgcccattcagtatgatattggctgtgggttgatcataaatagctcttattattttgagacacatcccatcaatacctagtttattgagagtttttagcatgaagggctgttgaattttgtcgaacaccttttctgcatttattgagataatcatgtgttttttgtcttaggttctgtttatatgatggattacgtttattgattgcctgtgttgaaccagtcttgcccagggatgaagccaacttgattgtggtggataagctttttgatgtgctgctggatttggtttgccagtattttactgaggatttttgcatcgatgttcatcagggatattggtctaaaattctctttctttgttgtgtctctgccaggctttggtatcaggatgatgctggcctcataacgtgagttagggaggattccctctttttctattgattggaatagtttcagaaggaatggtaccagcttctgtttgtacctctggtagaattcggctgtgaatccgtctggtcttggactttttttggttggtaggctattaattattgcctccatttgagagcctgttattggtctattcagtgattcaacttcttcctggtttagtcttgggagggtgtatttgtccaggaatttatccatttcttctagattttccagttaatttgcatagtggtgtttatagtattctctgatggtagtttgtatttctgttggatcggtggtgatatcccctttatcattttttattgcatctatttgattcttctcttttcttctttattagtcttgctagcggtctgtcaattttgttgatcatttcaaaaaaccagctcctggattcattgattttttgaagggctttttatgtctctatctccttcagttctgctctgatcttagttatttcttgccttctgctagcttttgaatgtgtttgctcttgcttctctagttcttttaattgtgatgttagggtgtccattttagatctttcctgctttctcttgtgggcatttagtgctataaatttccctctacacactgctttaaatgtgtcccagagattctggtatgttgtgtctttgttctcactggtttcaaagaacatctttatttctgccttcattttgttatgtatccagtagtcattcaggagcaggtcatttagtttccatgcagttgagcagttttgagtgagtttcttaatcttgagttctagcttgattgcactgtggtctgagagacagtttgttataatttctgttattttacatttgctgaggagtgctttgcttccaattatgtagtcagttttgcaataagtgcggtgtggggctgagaagaatgtatattctgttgttttgggatggagagttctgtagatgtctattaggtccacttggtgcagagctgagttcagttcctggatatccttgttaactttctgtctcgttggtctgtctaatgttgacaatgtggtgttaaagtctcccattattattgtgtgggagtctaagtctctttctaggtctctcaggacctgctttatgaatctgggtgctcctgcattgggtgcatatatatttaggatagtcagctcttcctgttgaattgatccctttaccattatgtaatggcgttctttgtcccttttgatctttgttggtttaaagtctgttttttcagagactaggtttgcaaccactgcctttttttgttttccatttgcttggtagatcttccttcatccctttattttgagcctgtgtttgtctctgcacgtgagatgggtctcctgaatacagcacactgatgggtcttgactctttatccaatttgccagtctgtgtcttttaattggagcattttgcccatttacatttaaggttaatattgttatgtgtgaatttgatcctgtcattatgatgttagctggttattttgctcattagctgatgcagtttcttcctagcatcgatggtctttacaatttggcatgtttttgcagtggctggtaccagttgttcctttccatgtttagtgcttccttcaggagctcttgtaaggcaggcctggtggtgacacaatctctcagcatttgcttgtctgtaaaggattttatttctctttcacttaaagcttagtttggcttaatatgaaattctgggttgaaaattcttttctttaagaatgttaaatattggcccccactctcttctggcttgtagagtttctgccgagagatctgctgctagtctgatgggcttccctttgtgggtaacccaacctttctctctggctgcccttaacattttttccttcatttcaactttggtgaatctgacaatcatgtgtcttggagttgctcttctcaaggagtatctttgtggctttctctgtatttcctgaatttgaatgttggcctgccttgctaggttggggaagttctcctggataatatcctgaaaaatgttttccaacttggttccattctccctgtcactttctggtacaccaatcagacatcgatttggtcttttcacatagtcccatatttcttggaggctttgttcgtttctttttactcttttttttctctaaacttctcacttcatttcattcatttgatcttcaatcactgatatcctttcttccactggatcgaatcggctactgaagcttgtgcatgcatcacatggttctcatgccatggttttccgctccatcaggtcatttaaggtcttctctacgctctttattctaattagccattcgtctagtcttttttcaaggtttttagcttctttgcgatgggtttgaatatcctcctttagctcggacaagtttgttattaccgattatctgaagccttcttctctcaacttgtcaaagtcattctccgtccggctttgttccgttgctggtgaggaggtgcatttctttggaggagaagaggtgctcaaattttagaattttcagcttttctgctctggtttctccccatctttgtggttttatctacctttggtcttccatgatggtgatgtacagatggggttttggtgtggatgtcctttctgtttgttagttttccttctaacagtcaggaccctcagctgcaggtctgttgggagtttgctggaggtccactccagaccctgtttgcctgagtatcaccagcggaggctgcagaacagcaaatattgcagaatggcaaatgttgctgcctgatccttcctctggaagcttcgtctcagaggggcaccgggctgtatgaggtgtcagtcagcccctactaggaggtgtctcccagttaggctactcgggctcagggacccacttgaggaggcagtctgtccattctcagatgtcagactccgtgctgggagaaccactactctcttcaaagctgtcagacacggatgtttaagtctgcagaagtttctgctggattttgttcagctatgccctgcccccagaggtgttgtctacagaggcaggcaggcctccttgagctgcaatgggcttcacccagttttagcttttttttgctttgtttacctactcaagcctcagcaatgggggatacccctccctcggcctccctgctgccttgcagttcaatctcagactgctgtgctagcagtgagcgaggctccatgggtgtgggaccctctgagctgggcatgggaccctctgagccaggcgcgggatataatcttctggtgttccgttttctaagagcattggaaaagcgcagtattagtgtgggagtgtcctgattttccaggtaccgtctgtcacagcttcccttggctaggaaagggaattccttgaccccttgtgcttcccgggtgaggcgatgccccgccctgcttcggctcacactccatgggctgcacctactgtccagcaagccccagtgagatgaacccagtacctcagttggaaatgcagaaaccacctgtcttctgtgtcgctcacgctgggagctgtagactagagctgttcctgtttggccatcttggaacctcttaaattatttttgttttgtgtgattgcaattttggcatgtttcttcaggtgcaatgaagggcgtgttggtagacattgtgaatgcagcacagatgaagttaacagtgaagacatggatgcttactgcaggaaagaaaacagttcagaaatctgcagtaacaatggagagtgcgtctgcggacagtgtgtttgtaggaagagggataatacaaatgaaatttattctggcaaattctgcgagtgtgataatttcaactgtgatagatccaatggcttaatttgtggaggtaagtaaagggcctgaagtggttgtaagatgtgatcccatctaatgccacgaaaaatcttgagtttagttggtgcataagtagaaaaggggtagcttgagggtcagtctcgcccctaggtatactttctcacatgttgttgcttattttacttttcagtcaatactgtgattgtatatttttaccattttgagaaatgatatgcttaattgcaggaaatggtgtttgcaagtgtcgtgtgtgtgagtgcaaccccaactacactggcagtgcatgtgactgttctttggatactagtacttgtgaagccagcaacggacagatctgcaatggccggggcatctgcgagtgtggtgtctgtaagtgtacagatccgaagtttcaagggcaaacgtgtgagatgtgtcagacctgccttggtgtctgtgctgagcataagtaagtatttcctaattgcttgaaatagttgatacttcctcttggctctcctaagcctgtattgtttctagaaccagaacagtgccaatattaaaatatactgtaaataaaatgcctgccatgtggaagcctactctttaattcttaaaagttctttctcaacagctagtatatattacatggtatgaagtgtgtcatgtgagagttgtactattattttgatctgaatgtgctagataattgaatttacatggtaacctttattttggcaattaagatttaatttaatttaatttgtcattaccaatttcttaattactgtcttttgacaaaactaagccaaattaaagatttttcctcttgaaggattattatactagtaacatattatttaaattattatgattttggccgagcacagtggctcacacctgtaatcccagcactttggaaggccgagacaggtggatcacttaaggtcaggagtttgagaccagtctggccaatgtggtgaaaccccatctctactaaaaatacaaaaattagccagatatggtggtgtgtgcctgtaatctcaactacttgggaggttgaggcttgcttgaacccgagaggcagaggttacagtgagccaaggtcacaccactgcactgcctggatgacagaacaagactccatcgcaaaaaaaaaattattatgattttatgttacatatttaatatgtgatagggctaatttattttactatcttttatttcttaatagggttttaatttgaactgtaataaatctttaattttattatggaaattagcatctttttacataatttttctatccacaaatgtaatgttcctcttcatttattgaaatcttccttcatagctgtttgttcaatttggtcacaagagtttagcatgggaaatatgtttaagcaaatatttactgaaataataaaatgtaaatatcataatttgtgttttttgtaacagagaatgtgttcagtgcagagccttcaataaaggagaaaagaaagacacatgcacacaggaatgttcctattttaacattaccaaggtagaaagtcgggacaaattaccccagccggtccaacctgatcctgtgtcccattgtaaggagaaggatgttgacgactgttggttctattttacgtattcagtgaatgggaacaacgaggtcatggttcatgttgtggagaatccaggtagaaatgcgatgattgcagacattcttttcatatcttgtatgtcttgtttctgcttatttaggcctaacatccagaaacagcctccagctggaatattttaggtcaagttgggaaatttttcatctctcaaagcttaaaatattatctaattaactgtataagaaataaggaaaagagagttccacttttaagttttctgagtggagagtttgaagattaaatacagtgatttatataagacgcttagtgatttatataagacacttagaacgatgcctgacaccaagtgcatattaagagttttttgatgattgatgattttaaaattagagcttgatttaagcttgaatactgggaaagataatttgttaaaggatattaatataaagtgttgaatttgttcaacttctccggaggtgaaactttttttttttaatcttagttttcctagtagcctttttgtagattctttggaattttctaccatagtgtacatgtttttgtgtgaacataagctttcatttctcttgggtaaatactaaaaatggcattttggagcatatggtaagcatatgtttaactttgttaagaagctgccagactcttagactcccatactgttttgaattatcagctaggtgttttgcaaatattgtctcccagcctgtgtctccttatcatttcatttttttaagtgtcttctgaacaccacaggttttaattttgattaagtacagtttaccaagtttttcttctgtggctcttgcttttacattgtctttaagaactctgcctaacccaagattataaggatttttctcctctgttttttggtagaagttttatagtttctggggtttcacatttagatctgtaactcattttgagttagtgtgtgacaaaaggctcagtttttttcatgtcagtgtccacttgttctaggggcatttgttgaaaaaagactgtcttttctccacctttgttgaacatcaggtgaccttacatgtgtaggcctgtttctgactctgtattctgttccatgtatctgagtgttagctataccacatggtcttgtagctttctttatagctaggcctgaaagcagggtcttccaactttattcttttacaaaagtgtttttgagacacttccttagttccctgccttccatgtaaattttagaagtggcttactgattgctacagaagttctgccaggagtttgagtgggataccattgagtttatagatcaaattgggaagaattgacgtcttaacggtattaggttttgtaactcctgcacatggaatatctctccatttattcagtctgaaagatttctttttatcagtatttagtaattcttaacatgcaaatcttgcatatattttgttagacttatatgtaagtttttcatgctttttcattctgtagtaaatattactgtttaaaaacttatattttcaatatgtagaaataaattatatatatagaaaaatacatgatttttgttcattgatcatgtatcctgcaaccttgtaaactcacttgttagttctaagagctattttatagattctttgggatagtgtgcgttcactctcttgggtgtttattcctgtatgttttttataagacactgcacagctctttgtggtgctcattattaccttcttattttccagagtgtcccactggtccagacatcattccaattgtagctggtgtggttgctggaattgttcttattggccttgcattactgctgatatggaagcttttaatgataattcatgacagaagggagtttgctaaatttgaaaaggagaaaatgaatgccaaatgggacacggtaagttacaaaacatccaaaaagcaaagtggcttataaagtaaatgtaatactcctaagacttatgtattagctgtcaggctgattattaaagtcctttctaagtattttattcccccaaaagtttcttactcaaggaatttgcatttagtgaaaaacagaaagcatcctaaatatatcccattgaaacaaaacattgattataagcatgtatattctggttactgtggccagtatttttatttctttaatagttttgatcctaaatctgccttttcatctaatgtgaagtagaatcctaaataatgttatctgtgtagcaagctattcaatggaaagctgcttctttctttaaaacaaacaaacaaaaaaaaccttcagtgaaagccagattcaaaaggttatataccaagcttgtccaactcgcagctcgtcggccaggacatgcagcccagaatagctttgaatgtggccccaacacaaatttgtaaactttcttagaaattgtaattattattattatttttttttggtaacttttttttaaagctcatcagctatcgttagtgtattttatgtgtggcccaagacaattcttcttcttccagtgtggcccagggaagccaaaagattggacacccctgctatatactatatgattccatttagaggacattctggaaaagcaaaactgtaggggcaaaaatcagtggttgctaggggctggaatgggggaaagtgttgaccacagaggggcgtaagggatcttccttgggatgatcttgattgtgggtggatttatgtatttgaaaactcacagaactatgtactttaaaaagatgtatgttcctctatgaaaattatatctcagtaaactttggcttataaaaatcttaaaagccctaagtgaccgaaaggttatgttagcattgagtgctttgaaatatggagtcagagggtggggtaaccaaatgttggcctttgtgtattcatcttttgatacaagaaagcaatgccaatcttcagtatttttaaattgtaaatgaattttgtagttagttgcactttactacaatttgcttgggtttttaaaaattatcaattttttaaattacaaatttcagaagggtagaaataaaaaaaaagacatttatagtgttcaaacactataaagggattttttttttctgatgaaatcattagaaactatttcttttactttagcaagaaaatccgatttacaagagtcctattaataatttcaagaatccaaactacggacgtaaagctggtctctaaattgccgttcgtattttgtttcactttctgcctttgcatgtgaacttctatcttttttactgcactgtgtgtcctttatcactattgctgttctttttttaagtctggctttaaatatcgctattgtggcttttctttttgtatgttaacttcgcgtttagaaagaccgtaaaataagtaatgtgatatagaaacagcagccatgttgtagtgaaaagagaatgtgctttgcaatcagttagacctcaggtcaaatcccacctcttccacttagtaagtagaacagcattgagtcacttcacttctctcaactgtcacagggagtcagtactctgttttgtatggggtggttgtatttggcaaatgcactccagtatatgaaatcagcctgtcagctctaatcctcataacagtcctgtgcctagaatgatattatcctattatcttttgttctttttctgtttatttatttatttattttgagacagtctctctctgtcgcccagcctggagtgcagtggtgtgatatcagctcactgcaacctctgacttccagattccagcaattctcctgcctcagcctcccgagtacctgggattacaggtgcctgccaccatgctaggctaatttttttgtttttagtagagatggggtttcaccacattggctgggctggccttgaactcctgacctccagtgctctgcccacctcggtctcccaaagtgctgggattacaggcgtgagccactgtgccccaccagtattatccttaaataacaaatttgttatgagtaaattttagggttggatagtgaaaattgatcacgaaatccaaattgcaaaatagaaaaatataacctactatgatatttgtatggtatgcaactacaatatcattattggttctcaaaagatttgagatcaatttcttgaatataacttgaaatttcattaaaagccagaagaccatatatatgtatgtatattatatatatatgtgtgtgtgtctgtgtgtgtatgtgagaatgattctaattttcaaatgtaagtttgtaactgttcatatctgaattttcatgaaatgcttccagcatattctaataaaatcatgcaagcccctaaaactctgataacaaaggttaattgtgattagaactaaattctcctgactggtggttgagaactcttcttctctttcccaactgactgactgtaatagggcctggaagatttctgcttttctcactgcctaccttattgtgcagataaagatggtattgggaacacttacataaaaatcactgtgtctcaggcatgattctgaccacttaatctgtgtttaatcttcatagtgaaagttgtaggaatgttttacatatgagaaaactgagacacataagggttatgtaacttgaccgagttcccacggctggttagtcagagagctgagatttgaacccaggcagttgggctccagagtccatgttcttgtctatgacattgtacttggtagcagttatgtatcttcagaagtcccgttacctggttaggaagaggtagatcactctttatagagatttacagcccttttacaatttgttgttactctgtcagagttaacactgctgctgttggcaaacatcatgttagggaaatcactttaatacatggaacccagtgctgttgttgtgttttttgactattgagagtgtgcttacaaactgatcatgaataagagcctacagtacaggaatgtttaatagttacaagtgatataggaagtgctgataacattagaaatcattaacttgtcagatttttatttctaagtagaccgtaagatttttaaagttaaatttgatggcagaaaattatattcaaattcacatatgggcaggttggtacatatttgtattagtctgagacaatatatttttctcgttctcacttagtactttacagaaagtcatttttagaggaaaactgattagccaatgacattgccaggcttttttttttttttaatacatatttttttctttagttgtaggtcaaaaatagtcaaatgttgacaatttcatgtggttatttctcacaagagaaaaaatttctgtcctactgaggtgaaattttcacccttgctgtacctttcattgtattttgaaggaaattatcagtaaatgttatttaaacttaatgtttataatgtatatatggctaaaatgttgctaaaataagcattttatgtaattcaggaagcagaagtttggtaaaaatttctctatgcattattgaagtccaggcaatttgatggctacagattattttaagagatgtttttctcaagaaaaagtagaaattaacaattgaaataaatgaatgagcatcaagaaattacatcatggattgtaagaaacttttctgatatggaccaaggtttgccagtcaattatgtcattgaaatttttgaaataatgggcaggcgctaattactttggcagaagactaccatgtaggaacattaagaagaacatgtcacattatcagcttctaactgttggagtgggttaaaaaaatggtctgtcctcatctgctgctatgcgggtttaaatgtggctcccaaatctcccacacttctgcattatgtatttaatacattgtagagatggttctgcagctaccactgtcagccattccagagtgagcacaaagatgacattttactgagcttgagggcttcctttcataatataaccctgttctcttgctgcgggtttttttggggtggggtggtgttgcactctgaatgatggaaactaatttgaattattttagtttaccttcatttaaaatgatgcctaatacagatagtgagcttaattttacctctaaccttgcatgttaaacttttgtttgagtggactttgaaataataaatacaaatgtttgtgtatacgacaagacagatttttctccaaaggtaagttcttccatataaattacactttggactcatctatatagggctttttttctttattttttgttttcttttttttttttgtccttcccttataattcttgagtattaaatactagatttagcaaatatattgtattaaagaaatttaattagatgctaatttattttcccaacatatttgaaggaatgtgtagcacttagcctcaaatcagataggatataaatgtggagtgtaatttatttgcactctggctttttaagatagtagttgccaaaatccagtttcctgacccccattttgaaatgtctgctctcacagctgtataatgtattagcttcagttgggactagagctgagagtttgatgtacacagttttgtcatccacattatatgctgtttgtctctgagggatcctgagtttgtccatgtttctgaaacaaccagtcaaggtgtattttgaggagaggggagtgagggctgaggtatgttgtctggttctgattggtatcacatgagctgctgagctgaaatcacagtggtttatttggtgtcttgcaggacccagcctttatatgttaatgtttttccctcattggtatgggatacctacaggatgaagtttcagacttcatagcaaggcctctaggactgttcttcctttgtctcctcacctccaatcatatgcccccttaattcttttttttcctcttttttttttttttttttttttgagatggagtcttgctctttcgcccagtctggagtgcagtggtgcgatctcagctcactacaatctccgcttcccgggttcaagtgattcccctatcccagcttcatgagtagctgggattacaggcacccgccaccacacccagctaatttttgtatttttagtagagacggggttttaccgtgttggccaggctgatctcaaactcctcaccaaaagtgatccacccacctcggcctctcaaagttctgggattacaggcatgagccaccgcgcctgccctcccctaactctagaaacttctgaactgtatgtatttctacttaaatgtcccattcttttccctacaccttgactttgcatagattgctatttaccaaccaataatttttctagtcaatttcacaatgaaaatctccttaatcttcttaaagttaataacttttttcttatactattcccagattatgttcataactctattgtaaacttcatcagagtgccttattttcatgtctctcacccaccaaactataccttccttgagggcagaaattgtgccaccaaaaggcagatccaaatacagtctgcaatgaagtgtgaataaaatttaaaaacaaaaattacttttagatcaaaaaatgttttagatgctttctataaatatttttttaaaaatcacctgcagttggttctatagtgagatataaaactgaacaacattccaaaatcttaattttttcttaaaaaaaatttccctggtagttaacaagtattttttatttgtactcactgtaattttctctgattaagtgttatttggtcacacttctcacttggctttcaagcctgctttcaatttataagaacaggagaaaaaagaatgctatagcaagtatttaaatgtagcagttatagtataagagaatttttaaggaaaagggtgatacagtgatatgtttttttctgcttaaaacatcactgtcagtatatttttggatcttgaaagatctcttgtgtttatggcttggggcctgcttgctaggcttgacttcagtactgtttactaaattatagcactgcaataagacatttcaccaatatgatattgaagcataacaagttatttcataaggaatggtaattatctaacattctaagcaaatttggcagtgtgacttggtggggcgcagtgctgtccctgacacaatgacagccttactctctaaattagtaacttccgtaggagaccccagaagcacacctccctcccagcagtgaaagccgaggattcccgttttgattagcaggcgccttctgttcacgataaagggataagaatcaggcagtgatggcagcggagttcatgcttcattaaggcaggcattgcaaactagttcagaggagagaatccacgatgacagcacattctgtgccatggagaacattcttaaatcaagcctccagtggaggaaggactcaagaatgaaatagcaccagataacggggcatcattagacttgtaaagcaaagcttccattttctatttttatataaaccattattaatgcctttaaaacaactgtgatatctggacaaataaaatagaaatgacttcttaagatgattgcaacttttagtcttgatttataaaaattattctacataattttagtagggtaactgataatttttctcactttttttttgttgtagggtgaaaatcctatttataagagtgccgtaacaactgtggtcaatccgaagtatgagggaaaatgagtactgcccgtgcaaatcccacaacactgaatgcaaagtagcaatttccatagtcacagttaggtagctttagggcaatattgccatggttttactcatgtgcaggttttgaaaatgtacaatatgtataatttttaaaatgttttattattttgaaaataatgttgtaattcatgccagggactgacaaaagacttgagacaggatggttactcttgtcagctaaggtcacattgtgcctttttgaccttttcttcctggactattgaaatcaagcttattggattaagtgatatttctatagcgattgaaagggcaatagttaaagtaatgagcatgatgagagtttctgttaatcatgtattaaaactgatttttagctttacaaatatgtcagtttgcagttatgcagaatccaaagtaaatgtcctgctagctagttaaggattgttttaaatctgttattttgctatttgcctgttagacatgactgatgacatatctgaaagacaagtatgttgagagttgctggtgtaaaatacgtttgaaatagttgatctacaaaggccatgggaaaaattcagagagttaggaaggaaaaaccaatagctttaaaacctgtgtgccattttaagagttacttaatgtttggtaacttttatgccttcactttacaaattcaagccttagataaaagaaccgagcaattttctgctaaaaagtccttgatttagcactatttacatacaggccatactttacaaagtatttgctgaatggggaccttttgagttgaatttattttattatttttattttgtttaatgtctggtgctttctgtcacctcttctaatcttttaatgtatttgtttgcaattttggggtaagactttttttatgagtactttttctttgaagttttagcggtcaatttgcctttttaatgaacatgtgaagttatactgtggctatgcaacagctctcacctacgcgagtcttactttgagttagtgccataacagaccactgtatgtttacttctcaccatttgagttgcccatcttgtttcacactagtcacattcttgttttaagtgcctttagttttaacagttcactttttacagtgctatttactgaagttatttattaaatatgcctaaaatacttaaatcggatgtcttgactctgatgtattttatcaggttgtgtgcatgaaatttttatagattaaagaagttgaggaaaagca

SEQ ID NO: 4 - DNA, 33445 bp, Homo sapiens
attggaagaagaagcatagtatagaagaaaggcaaacacaacacattcaacctctgccaccatggggaactgggctgtgaatgaggggctctccatttttgtcattgtaagtaccaacaagagataagttataaattctctgacttctcggggttatcttggaactaaaatagaccaaagcttttttgttcatttgaggaattgtgttgaaactgatttaccatgtgaacctatatctatctgtaaacagactgagtccattcttccaaattccttaatggaaagaacatatctgggggctcacttctagcttacttctgaattcctaggaggaataaattagccagcatttcgcagaaggagtagaaaatatttcatgctaatgatctctgattctgagttgtttagtaatgtttactcagacgcacatgtctatgtgtttatactactttaaaaatgacaaattgaaattttataccattttctaaataaaaaatataagattgactcatgtatgggaagtaggcctttatttcagtaattacactaaatataataaaacttctcaaatttattttcaaaaacaagtaccttcttttttcagagatctaaacttgagttatttataagatttataaaaattcaaaagaacagaattgaaataagtcatctagattcataaatatgtagtatgtatatttatatataattgtatatatatataaatcaatatagtctggagaaactatgtaagtaaagatatagctaatttacaagtggacagaatgatttctgtactttttaaaacaaagaaaatcaactgttctcttaaaatggtgttatcagcaaagcaataatggacaaattgggtagatagaaatacgatttttaaatagcctttctaaataaccaatagaagcattacacagatgttaaaaagtacaattatgaatggaatatgaatggagcttttgtaaaaatttatcatgaaaaataatgagtctttgagttttaaatatagaaagcaattagtggcacaaataaaaacaacaaatattttgttataaaaaatgtttacgccaaaccaacattctactgcaacagagaattcttccgagtattcgaagctgtaaacttaacttcttatcaccatttttaagggcaaataatttctatagaaagtaagttcaaattaaacttttagctctcgccacaatttttcccaggaaatgacctccttctaaattatatactcatgcacttgaaagtgaaaacacagcttggaaagtcagagtaaagaaagaatgacaagatcaggaaattgggaagttgctttagcacttttttctttgtaaagagagaatattatcaagtgtctagagcatataatagcttcaaagcatagttgagaaaagatcactatggagctgaaggtagagaactgggtagtgtgaccacttgatccagtcagtgcttaggataaaatgaactgtcatgatctagaaagctgtttttgttgtaaatcccaagcccctcactatgctcaatattctctccttgaagcattaagtaaaactaatcaaggaaaatggaaggcttggcattttagctgatgagaattcactagctggattactgtgtggtagagggaggtgattagcacctgtgagaacagaacgcagtgtcatactggtggagggaaagcaatagtaatatgttcccttcctttctcattttaagtggagtggcctgctatcagctacctatccaaggttaagcaaaagagaggggaaaaaaagggagtggggtaatgtaagactgataatttggtatactggccaaatcataaaacaatcatggggaacaacacagggtggagaggttttaattatagacaagtgtagtgacactgttgaggaaagagctggctctaagctggttatatccagctttgtcactacctttgtcaaagttggacttggggaagtcctgacccttatctgactccagtcttgtgtggaatctactgtggaaatgcggaaacttcatgcaattatttctgtttgtgcagctggtttggctggggttgaacgtcttcctctttgtctggtattaccgggtttatgatattccacctaagttcttttacacaagaaaacttcttggggtaagtataaattccatcccatgcaatattggctggttcacatttctcatcagacattcttgttcatcttcctgttagcattttaaatacatattctgaccaacccaaacagtaccattagcctcactccctccattgcaacttcctgggcaacagtcacttaaagccttccagtctgggaccaacaaaagtggggcagagggccccagtggcatccttccccaaccaagaaccatgtgccattgtttagcttaaaggagaaatctaatactcactctgaaatggaagggcaggttggagcaatccatccaggagtgacacatgtgggacaagtgggactttccatattttctaagtcacctaattcctagtacttttttgcatgaagagctctgctcctaatcacatgttatgaaatgatcttcagaaaataaatctctctctacatataaagactcgaggaacttgctcaagggccacatctgttgactaggacagtagagtgaaggcccttcagtttccttgggtcctttagtattctgagtttccttgaactgtcaggcctcttgcctccagaagacatctgttacatcatgctgaaactatgaattaattgcttaatattaattattataagtattataaatcataaataaataattttagcatataattatgctagatcattataattgttgttagcttattcacattgatgctttctcccgccaaaatatgcaacttctttagacattacaaatataataattataatgccaaagcattataccataccaatttaagatactgttaagatcaatttaagtgctaagaaaatatttaaaatctttaaaagtcttgatacttaactctagttaatgatatgcaccttaagtgttaaagagaaagtgaactgttgtctgtaacttactttgaaatgcatcaaaaattagatgagttgatggatggatacaggaatggatagatagaatgtgataaagcaagcataaaaggtataatctgggagatgaataaacaggtatttattgtaaatttccttcaacttgtctttatgtttgaacattttaataataaaatgttgaattagggcaaaaggtcaatttcagatgaaaacaaagggtcctagctagccctaaaggaaaaccgttggctctgaaggaccttcctgtacagatcacttggtgtctctggtgtgtggcctcatgctaagaaccttggggaagtggggacagggcatattctgtgctcaaaaaagtcactctgctccctttcccgcctcttctagtcagcactggcactggccagggcccctgcagcctgcctgaatttcaactgcatgctgattctcttgccagtctgtcgaaatctgctgtccttcctcaggggttccagtgcggtaagagaaaatgttttactaagttcctctaattttcaaaggccatcaagcaaaatgcccttttttaggtaaaaacaaatgaatgatttgggaggattccagcttctgtagaatactcatgagccaagccattatctagtatatttctgtgctatttggggatggagctccctaagacaactatttggaaaacaaattttgaaaaaacacacaaaaccacctatacctcaacagtagcaatgaagtagcacacacgtacacgtttacacacacacacatatatatatgatagatatgcatatatacagagctttaggaagttgacatgtgatatctgggagttaatctttcagtgtcattcaaaaaaatttaagtcagaggaaatatcttctgtggataatatctcaaggagatggagtcaatggacagagtcacactataatgaatgtaaccaagaagtgttggcttcatggaactggggagcatagagctttctaaatgtccagaattcctttgactctcactccaacaatttagtaagccactaaatgtactgtgctagaagggggaaaaaataagtaggaagaatctctgtaacccataaaatggtatacaaatttcttactagtattattgtacaaagatgacaaacaaggaacttaaaatctacaagtgtactcaaataaatattatacaaagcaaaatatgatgggttccacaaagctttacaaataaaatactatggggaagcaagagagaagttgtgtcaggtggggcagagaatgaagaagggcattttagagaaggtgacattagagatgagtatataaaaataagcttctaagaggtgtaaaggagagagaaaggcattctatgtggagaagatggcatggacagaagcacaggaaatagtgaggaaatcgtattcttgaaggccaagaattggcatagccttggcttctctttgtattattattataaatatttttttgccacctgtgaccacaccaaagagggtagctgggaaaaaagtagggattggtgtcctggtgggaccaattccgtggttcattaatgactagtagcttctaggttttttttaaaaaataaaaggtatagtaagctttttgaaaaaaatacttattaagtagagatcacttatggaggacagcagaaagcaaactacttttgtgggaatgtagggattgtacagggcagatgcctgacataaggctggagaaaagaggtaggattttactggtaaactagaactgcatatgtatagttgaggagttcatgcttaatttggcaattacagaatatttgaaggaggcagtgaactaaactgtaataacaagcataacttgccttgaactctgcctcatttttcctagttacactaaattcatgctgatccagagaatttttttctttaagaacatataacattcaatttactaatataggactagaggctataatttagcttttattttatgacttaactatttacaaaataccatttcatcttaaaccaactgccaaaattgggctctcacaaatctaaagtacaagttggcagaaataactgttacaccttcgcttcctcagaaaaagaagaatgttgataaccaatttaagatgttccagaaagagtcgtgatatcttcctctgaaaaattctgtgatgaggttcctttccttaagccataaattctatgctacgcaatgttgtcttgcaaactgagagctaaccaaaaccaaaaactaacaacagtacttggtattaaacattgattacaaggatttccaaaaaatcttccaaatttaagaaatcacagaggtaaaattacactcaattgaaagttttattaatgagccacctattgtaaagtataacgtttaatatatcgtaagtgcccagtgaacatttgctaaatgaagcccatgcactatagcttatttttgagttgggttctctatcacccaggctggagtgcagtggtacgatcatagctcactgcagcctggaactcctgggctcaagtgatcatccctccttgacttccatacatgtggggattacaggcatgagtcacctgcctggcgagttccttgtttctaaggagacacaattcatttttattctccctacccccattagaatagtttctatttagaggaagtaaagcctgagaaacaggcaatgttttcaccaagatggcctgttaagaaatcttggttagtctacaagtccaaatttcactgccggtgagcaccatgtcccatgagcagcacatgttgtaatgccagcttttatgcctcctgtgacccaggagggaagatctgcatgagagtctctaaagacagggatgaaatgagactgcccttcaaatcgcagagaagcttggctgtataactacatagatctttatataaaagaatatgttttaaaactatcagcaagcaacattcttttatagatcaagcatgtactttcttctgggattcctaacctgaaatgtgaacttttctaataaaacttcttctgtgattgtgattaaaatgagtgagtgtgctgtaactaatgttggaaatcatatagctgccactcattgaagcttaatggaattcaccgcatgaaatctgcacatcaaaccagtaaagtgggaacaaaattaaatggaagtgttggcattcaaacccaggtcattgtgtccccagagcccattcactttaaatcatgctgccaaaacttcttgaaattgtgctgttgcagtattatgatcctagaaagccattatatatatgagtgtttgagcatgccaagtaacctagactagaaatgacaaggatgttataaatacaaggacttaatagtaggacactatataagcaaaataaccacgaacttgcattcagtttctagaggtctcaatcattgaaactttgctttgtaatccttctggttacctagagaaagaaagccccagggttgcccaccccaccactccaggaaaggtaggggtaaaggctctcagactgctttgttgagaaaaatggagaatgggtgaagctcagcacacaaaaatctctgaggaagccttaaaaacccccaacttgccatgcagaaactaatttctgtctggatggcagtcctagtcttaagatcagaaagaaacaggaaggtgagagggtgaggttttatctgttaccttatatagtctgggagtcagaggcactcagtgtgcctctatctttaatcacgtggtctagcactagtctcttgggctttctgtctcatagtttttttttttagttgaaaaacaggtcaactaacacaaatgtaagaaggcatatgttggtctaaaagtatattaattgtttaagtctgtcaattagtgagttgtcagtcaataaatatttgttgagtgccatttatgtgctaagcactggggacatgtggtaagtaaagattaagttatagataggccatgagcttaaggagcttagagtgttaacaggagagacagagaataaatatggaacttccaaattataaacagtgctatgcaaataaggtagtgttattcatatttatcagatattctactgccagcaggtgtggatattactgtcaacttacttgcctgagttctgtagattcaaagttggattttgtaatttctcccagttgcgtataaatatctaaatcagatacattgatggtgcgtgtggtgagatcaagtgtacaaaaagtagagcttttgagtttctgtaaagtgttacaccccataaaatatgtacttctttttagttccacttcccattttcttgaaatatttttttcttactcagtttcaatagagcatagaaatctgctgaagtgactcaataatctcccttgcattagaatggtagtttattgaaatcgggcaaggcttccggtgacagtaacagagaaacttccctttagaagtcaatggcagaaagtaaagtaagttagtaaggaagctatggggcatgatggcaacgtggataattgggaagtggctggcaataatttagaagtaactcaaagcatataaatgcaatctgcctgatgatggggaacaaaaaattatgggcagtcacagacagtaaagtccttccttcctatgccaccaaccggttgtctcgcctccttttttaaggaagtggtgaggagatggtattcttaaaagcccagtatcagcatgacttgtggcttctttttggatttgtttgccattcctgtccacaccaaagagggtaggtgggaaaaattagggatttgtgccctgatggttggacccactccactgatccattagttactagtaatctcactttttcctttcaatataatatatgtgttttacattaactagctttttaaaaattacctattaagatgaaacagagtatcattgaatggacaatgtatttcccaatcacatctctccactgttctggctttcagttaatttttctctaaggatctacagttaaagctatcagggggcatcaacatatattattttacattttttatgatccatggtgattatgatgataaggataggactatgaagacagtgtatgttccacaacaaaaccatattcgtttgctttaaattcggcgtgcaggagccagtgaattttccccaaaaaatttcaaaaggatttgtcaacaaatagaaaagaacagtgtgtggcaagtatagacatgggggtaaattcatctctataggtttagtatgatcatctccagttccagggcatgaaaatgtacttcatttatgcagccaaataatgattaaaagatttttttaagtacatgacatactgtttttcacacaggaagcttacctgctagctggggagtgcagccttactaactgaaaacttaaataatgatactaaataacatcaaatattgattaaatacctgtcaatgaatatatgcaatagggatttgagggactaactatgataattatacaggtgaggaaactggagactgagtatgttgttcgatgtcacacggctaggtgggaggactgggacccaacataggtatatctgaagacaaaacttgctctgaaatgtgtaattcagtactgctttccaaccctactaattctcattctctgattctttggactccaacctagtttcaccactcctgtaaggactgtatcaatcatctatcgtgtaacaaattaccacaataacttaaaacaacccctgtttattagtttacagttctgtaggtcacaagtccagcacccagttgctgggttctctgctcagagtatcataagactgaaatcaaggtgttttctgggctgaattcccacctggaaactctaagtaaaaaccctcttccaagctcattcttgttggcagaattcagttcattacagatgtagcactagaggtccctgtttccttgctggtgatcatctagggtccactcaaatcctagatgttcctgcattccctgccacatgccctcctccaccttccaaccagcagcagtgcttcaaatctctgacttcctccatctctgacttctaaacccagatttaaagagttcatgtgattgggtttgttggcccagataatctccctattaaagtcaacttgggactttacctctgcaaaatcccttttgccatataatgtaacaaaatcacagagtgatgtctcatcattttcacaggtccaaactcaaggggaggagattatataagtcattgggggtcattctagaattctgtctaccacaaggactctcagaaactatagaggaaattaagttgaaatttaagaagccaaagaaagaaagaaggaaagaaagaaagaaagagaaagaaagaaaggaagaaagaaagaaagaaaataaataaataaataaataaataaactataaaggaacatggcaattgggaaacaggaaaaagttatttcctcaaaattttaaggaatacaaagtagaaaataattttcagcacttgtaatgaacacaaaagacaaggaggctatataagaaaacaaagatggtcaacttttcaacaacagatcagtaaaatgtattttacaaataaatttttatttcaaaaacattaagtttgaaaatttgtattttacaagtttttatttcaaataggaaaccattgttttgagagtctgagtcattgctcagctccactggtgaacatttaattataaccaatgcattggtgctccaccatattccctaagcactggcacttccaatccatgcgacaactgccctttgcaagcatcattcactctctgcctggggattttctttcagctttctcctggggcaagcctgaaatcccaggggattgatgtcctgagagcatccctcagagcagccctcagccaatcatggatggcagttggtggttgaacacccaagcttcttaacccgttaggtaaaaaccaaagaacgaaacaaacaaagtaaatgaataaaaaaccctttgggataagttctacacagtctcccagagttccctggtgtgatcgagcccaatgatatgatatgatcatggtagctgatataataatgcactcttcattaatttccttcccagtctcatttttaccctcgttttctatgaccaccttccggatagaatacttacacttaaattcttgtcacaggtttctaggcacttagaataatagtgactatattcctgcatttggtttggtagaaaagggcattaaccttttatagacaaatagacttggatcccagccaatgtgcaattttagctttagttttcttacctgtaaaatgaggacattaagatttaccttgttgcattaaatgagtaatgattatgggtaaactacctagttcacagaaggaattcaataaagcataatttttttatttttcctttttctggaatcctcagtgtcttccttgctactatttctgtaatttcaagaacctgacctcatggtttaaacttcctgccctccctagttatggctaactgagagatagatggtggagtaagcacaattttctgtgcaattatattttctacaaaatcagagtattttattaaaaataagtaagccaaatattaaacacccctatatttaaattgaataaaacatttagaaccaaatattttaagtacataaattttctttggtacttcactctcttgttcttaaagttccctgaatctctgtgacagtgcatttagactatggaacaaagcaaccagagcaagacattggccagttttcaggagagccaagctctaattcaaccataaatcagtttaaatcagtttttttctttctttgagcattggcacgaattgagattcaaactcacattttctaacatatgtaggttcgtcaaatacactaaaatactgagtacaatagtatttttaatgccaaaggaaatcatgtaaagtatgaaatatcagaatgtttatataaactctagtatcagatggcctgagtttaaatcccagctctgcaacttattagctgtgtgacctaaggctaggtaaactctctatccctttgttttctcatctgttatgtagtaataataatggtacctcccttgtaccattattgtaagaattaaagagttaatttgattattacattaaagattaaattaaattaaatattacatcaattacattaaagattaatgtaagaattaaattagtcaatgcatgtaaaacagttgcagaagctcttggtaaatgttagctattgttattttggctattagcatttggtcaatgatctcccctgtgatgttgttcacctacatgggcaggtgtacccttctttctcctctcatagtgtgtatgtcctagaacagtgttgtttgaaaactattcacttgttctagaactgttcacttgtctgtgtccccacttgactatgaggtatgtgatgttaatttctacatcctttgtttaatgagtaaattaatcagaactagaaactatgtagctagatatgttttttgtacaagtttatatttttatacagttaagcaatggattccagaggagactttatgtcaccagtatgagaacagaaaacataccagttaagccagccatgtcacttactggctgtttgacctgaggaagatgactgcatctctctgaacctcagtttcctcatttatcaaatagatataatgatacagtttgcagggtggtcatgaaaattaaatgagataatatgtatcaaatgtttgacacatagcaagctttcctgttaacaattactattccattctttcccccttaatccaaagtgctgctcaacaagagttcgaagacaactggacaggaatctcacctttcataaaatggtggcatggatgattgcacttcactctggtaagtttattaaagaaaacttggaaccagggagttccctctattcatagatacctttttatataggagatcaaccagttttatagttagattaagtggtggttggatatgttgtatttttttaatgagttttgctcaaaagtatttaccacactttctgccacttcaatattaggatttattcctttaggttttaaagcatttttatttcaggattttcctataaaaatgaaaatatgccatcagaaaagtcaatcctagtgtcctcaccctttgctattctttctagtgtcaaaaatgttaattcactcatgaaaacttatttattctaaaaaaagttcttggttgcacgtgtgaatttgtggactttttgcagcaaacctacaggagccatagcccataaattgagaatccctcaagacggtcattatcagctaaataccttcattattattattactattgttattgttattgcatgtatccatacaatggatatatatgtgtgtatatagatattatatgttattattaaaattattagggtggtagtgtcagtgcaagaagggctgtatttgggacccttatctaattccactaattcactcaacaaatcattcatgtgccagagaatatataagcacagtgataaagcagacttgtactctgcccttaaaaagtctgttcctagcctgagtaaaataggcttagattacaggcatttaactgagtttctcttctactagtagatctggcaggcttttttagcagtggcaaataaatagttcaaaagaaatatatgataaaatcttgttagaaactggcatagtgtacggattaagagcacatatttgcgtgccagaggtactggatttgattcttaactctgctgcttcctagcttgatgaccttgaacaaggttttaaagcagtctatgtcccagcttcctcacctgtaagatgagctgatattaatagtacctacatcattgagtcaatgtaaggattaagtcattgtgaagtacttataacagtacttggcatctagtaagccctatgtaagtgtttattaataaagaatgcaatttttaagacagagagattcataccttatggccataggtttgtatcaattcaatcaaatttgtcatctctctctggaggtaatttcagagtcaggttaatgggccagcaattaggcattcattacatgagtgttttcttgtttgagcccaaatatattatggagagagataatgagagcatatctaaacaccttcagaaactaaggctattgtgtagaatcttataacttgattgagtctttaggagcatatagctcaacatcttcatcttacaaattaggaaaccaagaccagagagttaagtcattttcccacaattacacaactagagaggatcttacccactagaattgccttgtctccttggttctggagacccagttcttgtctataagtgtcctgggcctccctttgtctccctgtggcttatcatagagtcagaggctgtcccagaaacccagcttacaataaatttgttcatacccttcattctctttgtttctcttctctgcccttttcagcgattcacaccattgcacatctatttaatgtggaatggtgtgtgaatgcccgagtcaataattctgatccttattcagtagcactctctgaacttggagacaggcaaaatgaaagttatctcaattttgctcgaaagagaataaaggtaagcctctcattatctgacttagatattctctaggccattacaattgaggactagatttcagtgagtgaagacctctcctttgccaaaaaaaaaaaaagttggctaaccatcagagggacaagtctgtaggttacaataatgggagtatagaaaaaaatgtctcccacactcctcacctcatgtgtggaggtctctagatgttttccaggtctttaagctcatccatgagaatgtgtgcatgtgaagcctggagtaactcaggcttacctgtgactatgcccaccagtcaaagaaagctgggaacacatgtctagtcgaacaaggtttggtttattacttgctacagcaaaagaaatctcacaccttgaggaactctgggcatctcaaggggatgtaaagtggatttagaatttaggattctgttagatggtttgggggaggatttaagaatgcaaggattttctctggatcagttatggtcaggaattgggggtagttctcagataaggtatcttaattattttttctaggaggcagagggaacagaataggactaagtctataataggcaaagaagcagtagtcattgtctaggctcagacatgattttggagtggttttgcttttatctcactccatcacagtcacagagtgacctcctcagaagctggtgttttgtgaaattatttatgtgaagtagggaacatcctggcctaagtattagtgtaaggccagccaccagctgacagttgtgtgatgcctttttcttttcttaccaacaacatctgagggatggcctgtgtctacagattgtcattccttgagaagcacatgtgcactgggagtaactcagcatttctctaggggtagccaggagggtatccagaagtaagaacttcttctatcccagcagttgttgaagcttcctacactcaaagacagaagctccaagtcttcatgcacccaatgacttgggaagatgactaaatcacattaatatgcactgaattctaaaaatgttttcttgtgtttagaaaacatccttagttttggaaaaaataattattattctcagacttacatgagaaaaacttgcctgatatacttagggagggaattaaacagcatcataaaaaacagattttttctacaatatattgggtaatttttcttttacattattcattgtttgcccaatgatatatgagggtggcaacattaacataactaggtaaatctacactatcatgctctattcagttgttcctggatcacttttactgtatctatgctctcctactcttctaaatgttttcattttcaataacctgtaactgtttcctcctcagaggactgccctggggctactaaagtcccttttctcacaggctcagagatcttggaaggttggtggggggtggctgaatggttacctgttcctgtgcaaaccgttagccaataactggtggatgcagactatgaaacctggcttccttgccttgagacaggataaactctaagttgtaacttaccctccagagttgccttgcaggatcaggctgaagctatcccctgtgagactgcctgatttcacccccttgcttgacttgtttgtcttttctatcctattccctactctcttaccagtttctcttggagcacatgttttctaagtcacttgcccatgaagtctcatctcaggatctgcttctggggagcacagctgatgatgttcagcattcccagaatatatttgcaaactaagcactgtggccctttcaaaatcaaagggagaaagagccttcagacacttttaggacatcctgtagttgattgatttcctttattttctacccccttagaaataactatttaagtacatcagttcacatttcctatgacatcttaaccatgtaagacattttaaaatttagaaacatctatttcaaatctatatctgtctgtgagggatgattaggattattcaaagagggggtgaaaatatctattgttctatacattggacactttataatagtcctgcatttgagaacctataatattgtgcttgcgcacatgtgtgtgtgtgtgtgtgtgtgtgtgtgtgtgtgtgtgtgtgtgtgtttatattttacagaaccctgaaggaggcctgtacctggctgtgaccctgttggcaggcatcactggagttgtcatcacgctgtgcctcatattaattatcacttcctccaccaaaaccatccggaggtcttactttgaagtcttttggtacacacatcatctctttgtgatcttcttcattggccttgccatccatggagctgagtgagtgtttaaattctgaagtgaaggatttcatgtccctcaatttctaggcaggatgctccattagaggcacagtgacctccttgcctgtgtgtggttagcctgtctgctaagggaatgtgagaggatagcagaggtcagtttgatagaaaccagtcaacattggcatttttgtttcatgcacccatgtaattgctattcatggtgaagttatatatagcaagcttgaaaaatacaccaaagtctgagtatctttgcaaatgtataaaacatattgagagcactggtaggatctggaacatctgcaatgatatcctctatggtttaatcactagtaaattaaacaaacctccagactagaagagttaatgattaatcagttgaagaggtttgttatagttcaataagttttgatttaagcccacagtcatttatttgttgtctaccatgtatgaggacctatctcaggcactgcaggaaatacaagcaggaaaaatatgtggttgttgccttcaaacattctaatataatgaaagtagcagctaacttctattaagggtctgtgctaagggtttgacatgatatatttcttttaacccccaaaatgtatagatttctcactatcaccatttcttggggatagtaattgcagacaagaaacctggagctaaaatgttaaaatatgcagcctaagccacctctctggtaagtggcccagctgagattggagccaggcagtctaaagcaggctgtgataaatgttctcttagagacacacagttcctggctatgtggttaggagagtttgcctgattggagatcctctttcataccaagtttccttttttgtgcagtttcataccacctgcacacaaaggcaggcctggggaagttccctggtgggtatagggctccaggaaattagggttggaggaagtagaagctcaagactcactctgcccagagcccagttggtggccaagacatgactgtgaaaaaggggaagggtggggaaagctgcattgggcactgcattcttaaactacttgctgactgtgacccctgataaactctttgtaagcatggagaaatcaatggagaccaagaatctgatgactctcttaaagcactcaaatatctttaaatgggacttagtcataatcccgtgtttcaggtaatcctagagaagagaaataatttcttcccctctccaatttagtaattccaccactttctgtttgtatggtttcgcagatactcatcttcctttgaagcagacagaggagatatgtttatctccttctccacttgaagagaatctgctctttacactggttaggtgatttctcacagtctcatggctccgtagcagctgaattgggtttaaaatgcaggtttctggactcctggtcctggcattgagaagagaaggagaaaatcagattattttcctatcatttacttaccatgggaacttaggcattttgaactttaatagttattttttggactcttactttgtgtctggcattttttatacatcatgcaaattgcttattataatgaacctttaatgaggtactattacatctgttttacagctgaaggaactgaggctcagaagaagttaaataatttgcctgagtccaccaaactagtaaggggtagaaatgagatttgaacccaagtctgtctgacacaaaacacaattgttttcaccaaaacattctgctttgagttactaaatcattctgatttacattctcatgtaaaatgggggtaataatacttgcctctcaggcttgtcatgaggattaactgagataatttgtgtaaaatgactttccccaagcctggcacatgataagtgctcaatacatgataattctcttccccaagacctaaggatagaaaggagtggttaatgaacttgaattaaaacattctcagaatacaccaaatgacacaataaattttaggtctccaaaacaaacctttacaatgggttttctgtgtcttttcttcttatatattctgaagatgctgtcatttatgttccttgaagtctactcaacgttgggccttcctctctctatcaccaataattgtcttatgatttggtagttgctcaactagcatttattgaattgaaatgaatgggctctgagcaattcaaggtacacactattagtgttgatgtctgtgagaatgttataatccctatatagttaagtatctcaaactggtttcaaaatttggtttgatttagataatttccaaacccacaaataaggcacttcttgtaagcttcagggctactgtatatgactgtctcagttgtctactatagtgggtgcctggccaaggacaataaagttagcccacactttgatgattgagccctttgcttatatcttcataggaagggtaccattttctaatttgcacaaaggcactgtaggggccagcagtcactctgttagatttgcaatttttctgcttttgtttgtttgtaaatgaaaatgatacttgagacagaagtagaaattctcccttaagagaatttgatccaacacttaccctctataatgttacatgtaaatatccctttggtaattgcacatatattttttctgttgctgagtgttatgcattttctttcctttcatctattcagagggagcaataagctatcgcttttaagtgaaaagtacagggcctacatcagagcacttaaaatatatgcagaatcttttaataaaacaatttaatttcctattactaaatgatctggacttacatttttcacccagacgaattgtacgtgggcagaccgcagagagtttggctgtgcataatataacagtttgtgaacaaaaaatctcagaatggggaaaaataaaggaatgcccaatccctcagtttgctggaaaccctcctatggtatgtacaattcattgttgttattacagtttcattactgacaatctttaacctgtgtctaagaaacatgtacagatgttatacatctatatagatgtccattacaaatgtcatggaacagctaaaacatgtgtctacttttctctgctatacttattggatagaattgtttcttgaaaactaagctttgcattgttctgttattaacatcctgatataaaacttgggaaaatagtgtttttagaagtgctgttttggttcaagaagttccatctcttttcttcatgacgacgccagctaatgatttttagggggacacttgggattccatcttgagctgagttggatagctcaaataaatcacttataaggagcaaagggcctcttcagataccagcacataatactttctatacagctttccaatttgaaaaggaaattgatgaggtggtacataaggctacctttaggcattaggagttttctgtttatgaggcataaaggaggctggacggcgaggttcataccaacatcccaatggcatcatgtggtgggcagaagtgtggcaagggtgaccaaggaaatacatggtgaaatactttcttccttctattgggagctctgaagggttccattttgtgtattctcataacactgctccatagagtaagatgtgggccttgtaatcttcatatcattttccccattggcagatggtatactttgttggttattgtgctagccattggtataaaactaggcaaaaatcaacatttgtgcagggcttctgaagaggattatttttttttccttaggcacagtataacataaaggcaaattttccattccattttctcctttcttttttcctactctcttagcataggagcactcttactctagacacagcatactatatgaagacgtaggatctttaagcatcttttcccattaatggaagcaaccagacatatcagtgaattggctccactacatgcagacatcaatagaaaggataaaaagggaactgtattgccaatcctcttgtgggcaggggaaggcacatttcctcgatgacagctggagtcagagtactagtaccttagcagaaacctacctcaaagaatttctaggtatactagcagcaatatccaaatctggctccattcagtggggctccatggtagcactcaggaaacagatagatgatttgagactgttttatatatctatcccattaaaacaaaggccaacaacagaacattgtttatatttggggcaaatattcttcaagtttggctgaagatggagagattcaggtgctctcaatttccaacagtaagtttcctataaaagtaatctagtagaaagattatatgtgagactatcggaagcactctcttatcttttcccccttagaatacattccggaaagtcattttttagataatattgctgtctaaaattctttgctagtttaggtattaaactagaagtccaattggctgagtttcaggatggatctgtttgacctcaatgtttttatatggccaataatgctacagagtaattccagtgttcagaaacactgcatgttctgacccaagaaatagctaaagaagtctgaaaagctctaggtttgtctccattcagcaagtgcattgcatactcccagaatttctcagaatattggagaaacagccaaactcttgcataaaatttgtcatcttgcaaatttgtcactgtgactacataactaagagaaagcaatcacagtgttgcattaaaaatattgtgttgctgaaatgttatcctttaaagaaatgttaattctgaaaccaaccttgctttgttatagggttactgcaactgtagttgcaacactgagaggaaatcccattcttgtgaggagttcctcttgggaaagttttatcttgtcagtacagttccccattgtgactaaggagaatgtttacttttactggctcaaaattatcttagtttcagatattttcatatattccattgtagaagaaatttatttatctaatgtcaaatatttaagcaagcctacaaagattaacttggcttctaaaatttttctccctctgaatattttgttatctattaccacttaatgtatctcattttcatttttgctctgattacagacttggaaatggatagtgggtcccatgtttctgtatctctgtgagaggttggtgcggttttggcgatctcaacagaaggtggtcatcaccaaggtactgattggtttagtaattactagtggtcagtgtctaactatatcatggacaagtcttcccaactcctctatatcattgatcagatgttacaacagagagaagacctacaatttatttcaatttacttagctcaataatcaaatgtttgagcctttaactggggaaactacaagttaccatttttgatgttaaaatgaagccaagttctttctggacatcaatctcccccacccattgtgtgtgtgtgtgtgtgtgtgtgtgtgtgtgtgtgtgtgtgtgtgtttgtgtctgtgtgtctgtgtgtttgtggaggggaaggcgacagaggcattatttggttagttaagagcagaaaagaaaaagaggtgagttcaaaggggcataaattgagtcttaaaattttcagatgccaaaagaaccagagatctaagggtaggtctcactgaggctgagctagtttttcaggttgtctttaccaccttttctgtgctgtgtatgtaataatctaataggaaagttgaagtgcccaaaatttcaacaagttagtaaataagctgcctctcaaatttgctctcctaattccaagtctagagtggcttttcctgaactctaatctgtttctcatcacaaaataaataaatatccaactaaataaatgtaaatggaactccttgttataatttcaggaaacactaggaaagtctatctttatcaaataaaatttaattcaattcaactcagttcaaaaagtatttgccaaaaccctactgtgggttatttttgcaaaacacacaaattcttcctgtcctccaccctatctttcctcatttgctgtctatggtgggtcatagtaaagttagttcagctggctttggaagtcttgaaatataggaaaccacaacagttctccttttgtgatatttatattgcattataagaacaatcccacagatcagcaaaaacagttgctgcaaaatttcccttactagactagagatgactgagtcagacaagtatttttcttaaacatacttttaaggaaaacttgttttcctttgaagaaaatagatatttgttttcttctcatataaataaatatgagaaacaagatgttatccaaaagtattccaatgagaatgctgtccacttatttagttacatctcatttgtgcctatgatagcaaaattgtaatatggtaaaaattttttccacaacacaaaattgcaacatggtaaacaattttcaacataattttaattttctgttttcaaaatgaagctttacaactccttatttcagaacagaagggaagtttgttatagtttttatcatgtaagatgcatttaaatcacaagttctggaaacgtttgacatttttttaaaaaagaatttttcactcttccacaactccctgttcgagaaaagcccagcaatatcagttaacattaggaagctgctattttatttctattgatttttctttcctttgatgtcccttggtttgtctttaattatacatataaggttcttctagaagtcttaggaatcatcaaagaaacagtatattactttctgtattgctcttcactgtgttctattttttaaaaaaattatccagtcaatagttgatggacatttggattgtttcctgttttttgctattatgaataaagctgttataaacgtgtgtacgtagacagatgaggatggcaatgggtgggtagaaaagatggtgtactccccaggtagggagaaatgtagaaataacgcatggaatcaggcagattcaaggtgtgattcaggacaaagatagaccaacttagttagtcttgttttggggaatgttgctacataactagtcaatgggatctccttcttctggccagctattaggttggtgcaaaagttattgcggtttttgccattaaaatatggcaaaactgcaataatttttgcaccaacctaatactaaggccctctctcatcctcttgggggataggaaggctgagcaggaaacatcagtttttgtaaattttttagcacttttttgacttctgagaggaaaaaaaaatcacaataggctgatttcttatgttggattccctggtaaagactgagaaataactgcatgcagaaggtttctaaggaattctataagagataaacctggaaaggaagtaagaaaggcaggaatggggagagagaaaagctgatcctctttctagttgtaactgtggcctcagctgatactacagggagtgtggaaattgagatggcctcttggagttaacctaagttaaggaaaagggactaggccttagtatcccttaatcagcccatcattagtaatgggctacaactgagggcaattccctgtgacagacacatctgctggaggaactcctgtgttgtccctaaagcagagatctaagtgggccaatttagctcagttttttatccatatggacactaaaaaggcaagtatttaggaaaaatgtcatttccagacatatgttttattctataggtggtcactcaccctttcaaaaccatcgagctacagatgaagaagaaggggttcaaaatggaagtgggacaatacatttttgtcaagtgcccaaaggtgtccaagctggagtggcacccttttacactgacatccgcccctgaggaagacttctttagtatccatatccgcatcgttggggactggacagaggggctgttcaatgcttgtggctgtgataagcaggagtttcaagatgcgtggaaactacctaagtgagtaaaaagtacatattaccaacgtatatgagttcaggaaaaatggcactaaatagctcctcttcctccatgttttactaagtctccaacaaaacacacaggttctaagaatataggtagctatttctgtggtcaccgtttcatatgtgtagtgtgtttatgcatattttcataaatcttatgtgaaatatgaaaaccttgaatcaaatattagaaataaatactcccaaattcctttaaatatgtaagggtcaaggccaagttatattaactttcctaacaaatataattgtagtgtatcaaaaatattcttaaattttcattggcataatttatttgaggttaaatgccatatattagcccctttgcctccttttccctgcatgcctaacatgctataaggcacttagtaggtgctaaagaaaggtttgagagtttgttgaataactcaatgaatagataaatgaaaagtggagacattaaatctacaagatgtaatgatgcagcaaatcctcacttcagggtgcaccgtatgcaagaatttcaagagtgggatgtcctggcaagacatagggtgtgtgtggagggggcgttgttgtgtgtgaagaggggtggggagattaaaaaaaaaaaaaacttgttctgagttaccgaatgtttttggttagccaaatatttctctttttacttccaaacccaacgttggcactaagtttggttacttgaaagctatttcatagaaggaagcacccaatagatacattattccaatttgaattaacatgttgcacatccccaataattatgggtgccccatctcactctgaagagcaagacatctctgtaactatctcctccccatttcccttcaggatagcggttgatgggccctttggcactgccagtgaagatgtgttcagctatgaggtggtgatgttagtgggagcagggattggggtcacacccttcgcatccattctcaagtcagtctggtacaaatattgcaataacgccaccaatctgaagctcaaaaaggtaagtcctttcatttatcggagggccttagagcagtaaccatactctgccatgtgaggcctgagagtgctttcagggctaaggttggcagagaccatgggaagtgaagaaaagcttccggtggttccagagagacaggcttttcttcaaaagaatatttgttaaatctaatgtgcttctagataagtaggcctattagtgaagggaatatattgtatttgtatagtgttgctggaaattcagaagaaagaaagttgggaaagtattcacagccccaacttaatagctgtaatttttgtatattctcttctaatattttccatgtttacatatttttagaaggttgtaaatattaagtatgtataatttcatgtcctgcttttaaaaaaacattatagaaagtgtttttcaatgtcttcacaggctttataatgatgactttaaatgatctcttcatgttctattgagaggatattgaataatttttctttcatcttgtgttagatactgagattgattcaatttccagccgcgccccaccccctccactcacccaatactttttttgcaaagggaggagaggagacctgaaactctacttatgaatatctcctcaggatcaattcacaggagattttttggttacctataaatttggttttattgtgtaataaagggcatcctaaataaacctcaggccattctaataactgtaaagataaactctaatagggacattaagcctaccttgacttttcattctccctgtacctcttttccatgtggaggagatgtgcatagaaccttatttttcccctcggaactcatgaatgtctggcagtagcagccagggaagaatttctgtggcaatccctgctagtctagattccatcaggctttctgagaagaggttcgaaggaagccagagattctgggagagtaagagcagactcagagggaaatttggtgggctaatagttttttcttaagttgtgtatttctgaggtcaagttacttatttactgccctgctagagtgaaggccagagcaggttcatgtaaactaccctgtgaaatgtccagagccttctgaaaatctatgtttctaggcattctgagcatcaagaaaaagtttaggtgacagaaagtggaattccacatggtaatgctgatagggcctgccaaatataatctgcttcatgatccaccccattttcagatctacttctactggctgtgccgggacacacatgcctttgagtggtttgcagatctgctgcaactgctggagagccagatgcaggaaaggaacaatgccggcttcctcagctacaacatctacctcactggctgggatgagtctcaggtaaggacaagactccaaggctcaggtccttcccatagtgtacagggcttacgaacttccccttggttattggtgtgtcttgtgtactattttttctaagtatgtttagtggatttggtgatccggtccattcactctcatttagtatcgccacattatatttagactgctcagattagaatcaaagccaaggagcctgtgagggaataaaagccatcactttgacattattagagcaattctcccaccaggcactctgaaaccaggtgattgagatgatgcacagggttattttggggaaaatttagctttctctttctctctgtctctctctctgtctctctgtctctctctctctgtctctgtgtgtgtgtgtgtgtgtgtgtaaaacagacactccccaacttaataatggttcaacttatgatttttcaactttacaatgaagtgaaagcaatatgcattcagtagaagccatacttcagtacaagccatacttcagtactgtattcaataaattacatgtggtcttaaaccttttattataaatagggttcatgttagatgattttgtgcaattgtaggctaatataagtgttctgagcacatttaaggtagtctagactaaactaactatgatgtttattaagttagatgtattaaacccattttagacttatggtattttcaatttagtgatggttttatcaggatataacaccattgtaagctgaggagcatctgtttatataacatacataagcatataaaggattctgtatatatatattttaatatgtatttatatatgtatcatatatatttatatgtactatgtatatatgtatttataaaatcatttaatttatatgcttttgtatgttttataatatactcactacatttataattattatgcatatatattgccaggtattattcttatgtatctagtcacatagattgtctaattttatcatgtcaccaaccctatgaagtagctcttattattttccacactttacagatgaaaaaactcagaccaggttaggtcattttcctaagagcacccaacaagtaagtgacagagacagaatgtgccagagcctgtcctttcagcatcttgcagtagttcatgattatcatttataaataaattactatatatctaatgaatgtgatatatatgcatgtatgtgtgtgtgtatgtgtgtgtacaatgagagtgctctttcaaaaatgtttggagaccactataataaagtagccaatagttctcaactgggacaattttgctctgctcctccccaagacacacaccagagacagttggcaatgtaaatatcctacaattaaaaagacagccccccacaacaaagaattatacagtcccaaatatcaacagtgctgaaattgacaaaccctgaaacaaggtaatgattcctggagtggtaacatctttgtaagtaagcaaacgttaatgacttggcctggaagcagcataagctatcaccatgagtgaggagctaaggcaagagtctctgcatatttctgtccagtgtctcagctggtgtcttagtccatttgtgctgctataacaaaacacccaagactgggtagtttgtaaagaacagaaatttattttctcaaagttctggaggctggcaagtccaagatcaagacaccaacaggtttggttgtctagcaaaggctgcatcttctgggtgggagaaatactgtgttttcacatggtggaaagaaaaagggaaggctcgtcaaatactgtgtgatgactcttttccaaagcccttaactcattcataagggatgatccttcatgtcttaatcacctttttaaggctccacttcttaatgctatcacataggcaacatctgaattttggagaggatacattcaaactgtagcaactgggcatacatagacattgactccacaaccctgggaatcttccatgtgcaccctgtcactgtgaagactgaattcccatttgggtttcaacatattgtttatcacagattctccaagtcttaaaggaatcttgtagcaaatatagattagggaaacataacgataagaattgttgctccataaaaagtggtttcaaaatgccagttctgcaatttaaaaacaaaacaaaaatgctttgataaaaataaaactcaggaaaaaaatctatagtatataaattgctttactgttctgttattttaaaagccatgcacaggtttcttttttaaatcagttatttatttgtattgaaaaagtaattattttgctttgcaaaactgatatctatagaattattaaattggagtgcccacctttcttaacctcctctatgaccatcatccatctagtgaatttcaaatctgatttgctttttaaaaataaatttaattaaccacttttatgaaaaatacctgttgctcaaactgaagcctcctagaatggtagcagaaaaacagtatgtgactatatacacatatgtgcgtgcacacacacacatacacacacactagctttaggcttgatttgatgtcttatgctaccaaagtattgctgcattttagtctaaaattgttacatctcttagtaattctcccaaaggagtggaagtatattagggtggagagaaaaagtcaaacatagagcagagagaaaaacagtgagacactattcatccatcaatgcctgactcaaatactgcggccctaacccttcccctattcttccacttcaccttccttctttgttctcattaggacgcttgtgcctccttcatgacacacatcataccctgttcgacatatgggattatttatatttatacttcgaagtctccctttctagactgtaaattgcttgagagagatccagtttatttatctttgtttacctttcagcatccagcagggtgccttggttagaatagcttgtgaaggatgtaaatacattgtatgtgcttttacagaatgtctcttttttttctgaattcatgtcctttcctgtaggccaatcactttgctgtgcaccatgatgaggagaaagatgtgatcacaggcctgaaacaaaagactttgtatggacggcccaactgggataatgaattcaagacaattgcaagtcaacaccctaagtaaggagtctgtcaccaagatgtttttgaggcttgcatctgcctaaagcggcagcccctatacatatctaaacttatatattttagaaactcaaatatgtatattactatataaagattgaattcatgcccaacagaagattccagatatcttcaactttaagaaggatctttaaattataccaaattacctggagattaattaaaaacaagtatttccaggtccccatctcagattttctcaacctgcctgtcccaagtagggccacagcttagttcttttctttagtcacctaaatttcattagtgtatctacttcttttaaagattcaatataatttatacatattgttaagaagacactgtccccactttcagttctaaaagcttctgggtctaaaatcttaagttgacagatgtctcaaggtgctttctgctctcactaaaactttagtcattataaaaccttgagggggatcccttatcttgctagaacacctaagaaactcaagagatcaccatacgtgtacccttcagactattgctttttgcactgtaaggagcatacaaagtgcctggggatctctttaaaatgcagataccaatttagaagatttgaggtagggccaggtaatctgcattttttaaaaagctgacgccaaggctactgatcagaaaccacactttgaacagggcttcagactctaaaatttagagaaatgaagccacactgagtggttggcatagttagcttgttcctaatttcaagatgccagggggcacagagccctgaaggaaagtagcccacggactcatgaattcaccaccattttctctgtgatagaagtttccaaaaaccttggttggattttacttttgccagggaagtcaactaccttttgaactatccagatgctcacacaaacaggctgaaccacactccctctgagcaatatgatccctttgctatttgtggaaaagaaaaaggagcagaggggactctgccctggggcctcaaattaacgggaaattcacctacctgctttgtagacatctcatcccaaagcttgaaattgtctttttttttctttcccaaaagtaccagaataggagttttcctctgtggacctgaagccttggctgaaaccctgagtaaacaaagcatctccaactctgagtctggccctcggggagtgcatttcattttcaacaaggaaaacttctaacttgtctcttccatgaggaaataaatgtgggttgtgctgccaaatgctcaaataatgctaattgataatataaataccccctgcttaaaaatggacaaaaagaaactataatgtaatggttttcccttaaaggaatgtcaaagattgtttgatagtgataagttacatttatgtggagctctatggttttgagagcacttttacaaacattatttcatttttttcctctcagtaatgtcagtggaagttagggaaaagattcttggactcaattttagaatcaaaagggaaaggatcaaaaggttcagtaacttccctaagattatgaaactgtgaccagatctagcccatcttactccaggtttgatactctttccacaatactgagctgcctcagaatcctcaaaatcagtttttatattccccaaaagaagaaggaaaccaaggagtagctatatatttctactttgtgtcatttttgccatcattattatcatactgaaggaaattttccagatcattaggacataatacatgttgagagtgtctcaacacttattagtgacagtattgacatctgagcatactccagtttactaatacagcagggtaactgggccagatgttctttctacagaagaatattggattgattggagttaatgtaatactcatcatttaccactgtgcttggcagagagcggatactcaagtaagttttgttaaatgaatgaatgaatttagaaccacacaatgccaagatagaattaatttaaagccttaaacaaaatttatctaaagaaataacttctattactgtcatagaccaaaggaatctgattctccctagggtcaagaacaggctaaggatactaaccaataggattgcctgaagggttctgcacattcttatttgaagcatgaaaaaagagggttggaggtggagaattaacctcctgccatgactctggctcatctagtcctgctccttgtgctataaaataaatgcagactaatttcctgcccaaagtggtcttctccagctagcccttatgaatattgaacttaggaattgtgacaaatatgtatctgatatggtcatttgttttaaataacacccaccccttattttccgtaaatacacacacaaaatggatcgcatctgtgtgactaatggtttatttgtattatatcatcatcatcatcctaaaattaacaacccagaaacaaaaatctctatacagagatcaaattcacactcaatagtatgttctgaatatatgttcaagagagagtctctaaatcactgttagtgtggccaagagcagggttttctttttgttcttagaactgctcccatttctgggaactaaaaccagttttatttgccccaccccttggagccacaaatgtttagaactcttcaacttcggtaatgaggaagaaggagaaagagctgggggaagggcagaagactggtttaggaggaaaaggaaataaggagaaaagagaatgggagagtgagagaaaataaaaaaggcaaaagggagagagaggggaagggggtctcatattggtcattccctgccccagatttcttaaagtttgatatgtatagaatataattgaaggaggtatacacatattgatgttgttttgattatctatggtattgaatcttttaaaatctggtcacaaattttgatgctgagggggattattcaagggactaggatgaactaaataagaactcagttgttctttgtcatactactattcctttcgtctcccagaatcctcagggcactgagggtaggtctgacaaataaggcctgctgtgcgaatatagcctttctgaaatgtaccaggatggtttctgcttagagacacttaggtccagcctgttcacactgcacctcaggtatcaattcatctattcaacagatatttattgtgttattactatgagtcaggctctgtttattgtttcaattctttacaccaaagtatgaactggagagggtacctcagttataaggagtctgagaatattggccctttctaacctatgtgcataattaaaaccagcttcatttgttgctccgagagtgtttctccaaggttttctatcttcaaaaccaactaagttatgaaagtagagagatctgccctgtgttatccagttatgagataaaaaatgaatataagagtgcttgtcattataaaagtttccttttttattctctcaagccaccagctgccagccaccagcagccagctgccagcctagctttttttttttttttttttttttagcacttagtatttagcatttattaacaggtactctaagaatgatgaagcattgtttttaatcttaagactatgaaggtttttcttagttcttctgcttttgcaattgtgtttgtgaaatttgaatacttgcaggctttgtatgtgaataattctagcgggggacctgggagataattcctacggggaattcttaaaactgtgctcaactattaaaatgaatgagctttc

SEQ ID NO: 5 - DNA, 96731 bp, Homo sapiens
accccggcggcggctggagagcgaggaggagcgggtggccccgcgctgcgcccgccctcgcctcacctggcgcaggtaggtgtggccgcgtcccctacccggccgggactttctggtaaggagaggaggttacggggaacgacgcgctgctttcatgccctttcttgttctaccttcatcggccgaggtaaaagtgctgaaaccatgtgaataaaatacaggtgggttccgccagcttcgctcctgaacctacccgcgctcgggatccagaagctgcgccgggagagaggggctcaggcctgggcggaggggacggaggtcagaccgtgcggaaagtgacccgggcaccccagggcgcccaggcccccagggagcgcggaaagtgcggtcgcggcccggccctcgggagacgcgggattgggatcaggcacagcgcgaggaagtcgatcttggagctagaacattttcctttggccatttacacgaatccactggaaaatgccgcagtgtttatcaaagttactcaaagtagaaatgtccagacgtcttatgagcttagacaaatcttttactacaaaaagaaacagcagttgcattcaaacaacaacccttctgaaccactactaaaatttagcataattactcttgtggatacattttcattgtcaagtaatttacttagccaatgaacttggagagcaagaaagttttatgtagtaaaatgtaaatttgagttaagagttaagggtgtttctttttgtctgtttgtctgtttttggcaatgtggctccaaaaccttaagcccacctaaaaactatataaatgcaatccattcttttgttggaatgttcaaggactagaaagacaattggagaagtgagagtttgaatctttttttacgttggaaacagtgttgcaaaatattttttgagttttgcctgacttagcaaagattcagtcgaactcaagtagagttcaaagcattgcagcgtgtagtaaaaaaaaaaaagagttgaagatgttgtgccatatctgattcttggtattaaaaataaaaaaaggaaccatttaatccctaagagttcctggaagaaatggaattgattctaccatctgacttctttgtcttagtagggacaaattcattgccttcacacaggcagcattttaattaaatgcaactaaatacattgatgtcctccttctccccagtgaaagtccgagcagtgcatagatagaattatattttctcaaaaaggcttaaatacatgtaaattattaagtgttttaagtgagaaatctttgtcagttgaaattattttatcaaatcatttttgttctgaacggcacttttgttttaacgtatttagaaaactcttgcattaaaacagaaattgatttgtattatcccctgtatttgaagtgcactttaaagtgtatttgaatgagagattataatcaaattacttgatttgtgtcttatcctcttactcttctaccttggatttgaaaaggttggatttgaacactaggaaaaaagagatttttctactgagggattgtgggaagatttttttttaagcctctgtatttgaagtgaaatataaaataggattttataatagtcttaataactagaaagttttaagctaggataaaaatggggtgtatactttaggtctttatctttcctgagagatgaaattggtagaaacgttattttattgctagatttcactttagaaatgaatcaccctgatctttgttaggcccctatttaatattctaaatgcaggtctaatctctctgcttttttttaatggaagacttcttagtagaacttcacttatttagcacattgtttgcccatggttataatccaatatgcttgtgccaagacgtattttggaattcaagctttttcagaatttggaattaaaatttagaatctaaatttcagaactgagaaagacattgctcagaatttagaaaggtaaacatacatgttgaccctgctggttacatgccattccaatatagtctggagagaatcctgtaattccatgcattaatatttctgtacttttacatttaagaacatgaatattctcactaagtggaataaataaagactataaagagctgtgtgtctgtttagagcaggtgttatcactacgagagcttctctaagacttaccaaaaaaaaaaaaagtgttgtttttcagagctttttagagctgcagctgagggactgagtctgtattagactccactgaactacggtttgcttttaaaaggaaagtgcatttatgttgttcaatacttcacactttccagtaattagaagggcagttcctctctctttagggagtcttaaatagcaagattttactgaattttcaatcataccgatcaaaatagaggtacttcaagtaagagtggatgtctcatctttgtaatataatttcaaacagcatagtttctgacagtctaccattttagagaaacagagcagaagttacttacaggaggggttactgtcaccctttacagctgcagtctgtccatggaagaaatattatttcctgttaactttgcaaccagctgggtttgtgtcagttatctaagcctaagtgatggctaatttttactttctcaactttccctgtatagatttttttccagctaccccctgacttttctactcttgctttgctggttttaacattttccactacttctggattggtttagctataactgggtggagaaaacaacaacaacaacaggaatttaggcctttggggaagaatttgttttgttttagaagtctacacattgagcattactttttcttctaaagcaactaaaatcagaaggcagagtcctaatgagagattatgatcaaattgcctcatttgtgtcttatcaccttcctcttctacttagatttgaacaggttggatttgaatactaggaaaaaagggttttctactgagggattgtgggaagatgttttaagaactagtctgattggattttaggaaagttcattcattttgatatgatgttatcagggacattttctatttgcttataattttatctgaccaatattagcttgtatcaatttgaggtttttttttcctttatgaatcaattgtgcaaggtttgccctacatctcttaaaaggtggttaaactggaatcttaaagacagttgaatttagccaagaccaaagatatgcaaagaaagaatattttgtttatgttacagtacatttaataaatccaaatggctcccttgattcttttctttctgggacaccacgtattgatttctggcagctggccaaaggcagatggtggtggagcaagcgaggacagttaagaatgttgatgattactggattactgaggagtactgtgagctttctggtcctctgctcagaggtgtctagctctgaaactgggatcctggctctgagctggagaggcgcttccagttactgctgtcctggagcgctggaagggagcataagtgtgaggagacagtgggcttttagcctgggatgcagatgagagatgtcttgacctgagtgaaaaccttgcaggcaagctgcaggtctaccgagcagggtgagggaggctctcgacctggatactgtgaactagggagagaaagtaaattcaacagaaggagggcccagggcagagatttaggaatatccacagtttaaatattgctttacttaagtatactctgcctgactataagtagcatttgaatgttcaacatatgacctttcatttctcccctccattggtttgtcttaactgataaatctttattttcccatggtcaacctggtagtttattaatattacatctatcagttcctgttgagttgacatgaaaatgttttggtgtgacctaagttaatttctctttttgtttaattttaatttgtaatgagttcctcttttcattctgcccatcctttggtactgctttgagttatgtcctctagaattctcactatttccttatgattggcatattttcaaagttttttggtgtactaattttaaacagtgtttgttgacactgagaattcaggactttggagttttagaccaccatcaccttctactccttctcacaccatcccaggataattattctctcatttgagattaagaagttatttggtttattttattatggttatataaatatagtttactgctaaagcaaggtatatcattccattttctatctcgtacccctttttgctcttcctggggtaaacccttgctttgtttttgtgttttcttagtttgcactgtgcctattatcatttccttcccaactttctgacataaagatgaaagccctattgacacaattttctacagtgtcagatataccaagtaatctcacggttccatttttctttctttttttctagaaccctccatcttcttcttgtctaacagttgctcttcagtcttgctatacatacagtaatacctgaagaatgtttggaggatatttggtgtgggacttttcttttttttttttctttttcttttttgtagagatgggctctcactatattgcccaggctagtctcaaactcctgggcccaagcaatcctcttgcctcagcctcccaaagtgctgggattataggcatgatccactgtgcccagccctatggggaatatttgttgactaaatatgttttatgtaaattgcttatcatactctttgttgtaacatctgtggcattaatatgcctcttgttaacactcacctacattttacctgttgtaaatccactgtcataattattgaaaatatttctccagagctttttaattctatggttatttatttattgtagtatagaacttttatgatttcttccatcagggtgcattctgaatcatgcttagtgagagatggtttttaactccactttaacagttagcatctatgttttacatcagtgtcaatgtcacttttgtattatatacgacaccaacattttattatctgagtgatgagaatgtttatttttgtggaaatggagatctcatgagactttaagcagattgctggccttctcctcgatttccttgattgattcctgaagtggaactgcagtgctaagtggaattccctgggaagcttgctcaagtaagtaagcatgagaaatgctgaatgaaataaagtgcagcaagcagggataaatatcatgggcatcttcagagcctttgtgcaggtaacatgcacagagattctctgagagagtcagtctcagccagtggtcctacacttccatgaccctgcagtgcgtttgttcttagagtggctttcagggctggctctgccacagcctctttgggaaaccatgcatgacctcttgctgctccttaccaagctccttaggctttgcttggtagaggcagaatgttgtggttgttttcatcttaaatgctaacaatatatgaattatgtggtggatacactgcctcaaagtgacatttatcgaatatttttgtagctacgggttgagagtaagggtctgaggccccactgggttcaagtcccccttctttatttgtaagctcttcttttgtaaatggagcagtcacagggggcttcactctgatacctaatggagaccgtgcctgcagtgctcggtacctggtatgtggttaaaactgacataactgtcagagcctctcccaggcgggctgactctgggaatctgccctgcagtcttggagggaaggcacgtccagataggtttgatgagcaactacaattgccaaagttagtttctctgacctccaagatgggagaactttctaatattttcttttaggaaagttgtccattgcataactgatacacgagtacatatcctttagtacaggattcagatacagcgagcaacagaaaagcccttcttaacctccaccctcagtcccagccctgcccccagtcccactgttggggagcagttggagctctaacctctcttctttcgtcctgtgcattcatgtgtgcatgtgtgcacgtcttcagaagatataatggtgggctgtgtatgtcttcttaatacctttatcactctggaactttctttttattaatatgttggggtgcggggaggtctccatattcagtgattattgtaatttttatgacagtccagaataggcatgtcgattttttttaatttttgatattataaacagtgctgcaatgaatgcactttttcttttcattctttccctctcctttgccatttgcactgtgttttcatgaaaccatcaggttaatctttatctcaaggaagcccttcatccctgtccatcctgttcttcagtccatccacttagttttcctatgattattttagcaagcaggtggttaatttccaaggaatgtagttacttctttgggatttttttaagtgatgtattagttttctgtgtattttattacttgtttgagtgcaccattacccccgtctcccggggtatcagttcatctgcttgcatgcttggtgcctctctctcctgctgtcagctttcctgatgtgctgggtatttccacgtgtgtgttggtttttttttttttttaggtaccctaggcattagtcttttaaggctgcattcttgcagcctgtcccacatgagataggaggagggcaagacctggatgtgcacagggcaggatgggcccataactggtctgtgtggtgtgtgggtggcaggaactccctgttctttgtgggtatggccatgccttccctattcaaacgaagccacacacctgtcttttcctgcgaggcgtcttctgctgctttcttggagctggggagcatctactcttcccttgtcctcccgctcctccctgttcctccctcaggtctctgtcgcttctaaggcactccacccttggtcttctcccaccttgcaccccccacactgctgcctgcctgcacagggggactgtgattgcccccttcagtgtgagcctgacctgcttcatgcctttcaaggagagcattcattgccaagctactcatggaacatctcctcagatcctcagcgtgctatgacttcattttctgtaatactgtttttcatgtttcttccccttctctgcatttatagctgtgcatatgcttgaggtggaaggccaccacttccttttggttaacaacaccaatcagctgatggtcatggctacgtgaaggaactcacagtgagggctcaggaagagcctggctagagcaggctgcatcgcaggccttggcgttaggttccccaaatcactgctggtgatcttgtagctctgtcatgaagtctgtcctgcttattaggataccgagggtccaaattcatagattcttagaagcctgtttaaatatgcagagtatctaattcaacccgattagaaacgggctcagaaaggtgaagggatttgtccaaccactgagtgatgctgctgggattagaactctcaaaactaggtgtttctaatccagaaccagaatccctatccactactctaataaggcgtaaaagaggatctgctgtcctgcctaattggtgggcaggtttggagtcctgtcagcagctcaggaaagcctggagaggcagagggaggacacaggctcagtgtcagacatgccaattttactcatcaccaatggttacacaaaacttgttttgatctttgtggcttttgcattgagaagttaagcatatacaataggaattagacacaatcccaaaccaatgagagactcaagtgagaagagctgaagcttttatgcatgccttccttccatagagataaatttactatccagagtgaactagagcctcgtggaaagtgagtgccgagcccctagctgtgagtgtctctgtccttcccacatcagacctccatgtctgtggctgtccccctacggggcagaactgctgctctctgcttgtgttgctgtcgtgagggttgggagtggacaggtgtggacagatctcagacccgtttccctcctgttatggaaatgtttgtgaggcaggtgggacttcaatgatttggtcaaggaaaggcagcttggcagctggggagaagggctcaggctagaaaggcaagcgtttgtgagggatgatttccccaaagaagccagcagtgtgtaaggtattccccggagcttgtttcttctcagaagactctggaagctgtgtcagtgtctgttatggaggaatggagtatcagtccgatcaggctttcataacaaagcaccacatactgaacggcttgaacagcccaatgtgtcgcctcccaactctgagccaaagagactgaggtcaggatgtcccagggtggctccttccaagggttgggtgggacaatgtgcccccagcatctccttggcttgtgggtgaccatctccagctccacatggcatgctccctgtgtgcctgtctctgggtccagatctccttttcatgtaaggacaccagtcatgttggagtagggctcaccctaaggacttcaatggggcgtaatcactgctgtaaagaccctgtctttaaataaggtcacactcagaggggttagggagttaggacatcaacatttgaacttggggggacacaattcaacctgtaacaaatgtgtgagtgaagactggcacctccccacgatggcctttctgtgatgccatcaagagcaccagggagctctccagatatggagatggacagatgtctaaggcccctgaaatgagcctgctgtacagatgattccagaactctgtcagtgtgaagaccaaacacaattaagcacattaaaatacttacggtaaagtgtttctttcactttagatgtgcaaaaacttaaagagagagagacttatgagaagactcagggaagaaatgtaagataaaggtgttaagggagacaaactccacaaaattgtaaagtgaagctgctgtggggagtagagcccagacccagataatatgcaggcatgggtccaagggaggctttgcacaccaggcgggggaggtgcagggccatggatgaatggtcttgggaaaacggcaaatcgtttggaaaaaaaaacaaaactttgctctttatatcaaaataaattccaagctgaacaaagaataaaaatatagcattgaaataatgaagctattaaaagaaaacttaggtgagttttaaaataattgtgaagaggcctgtctaaatgtgataaaacatatgaatttatattcacactcatcacaagattgataagcatgatttcctaaaattttaagcaaatccccataaaatgaaaaaatatacaaataagtgaaaaaaatggtaagatatatttaatttcaatacttgtggtaaagcatcaatagctttaatatgcagcgagttttttcaaatcaataagaaaaaagacacagatgggtgctgacagggccgtttggtaatatcttttaaaatttaaaacacaagtgctttcactcaacaacttcacttttaggaacctatcacacatataaattgacaaaagtggagaaatattcattgcaacattttattttataatagcaaaaaaaaatcactaagggaagtacagttgattcatatgttggaatcctatgcagtcttctaaaaaatgtggaatttatttcatacaccaaatataacaatgtccaagttctactagtgaaaaagcaagatgtaacatatcattgtatttgtttaaaaaactcatgctgggttgggtgcaatgactcatgcctgtaattccagcactttgggaagccaaggtgggtggattgcttgagctcaggagtttgaagccagcctgggcaatatggcaaaaccccacctctatgacaaataccaaaaaaaaaaactagcctggactggtggtgtgcacctgtagtcccagctacatgggggcgctgaggtggggggatcacttgagtccaagaggtcaaggctgcagtgagctgagatcatgccactgcacaccagcctgggtgacagagcaagaccctgtctcaaaaataataagtgaaaaaaaaaaaaaaaacctaaaaatctcccacatgcacataataatttaagtgatattggattgtcgtttactacttatacatgcatttctgcctatacatattctatccagtgtgtacacatgtgtatgtaaatatgtagcatgatctggaagtgtaagcaccaaattaagaacagcagctttggggggaggggaatagaattggtttagagaaaaaggtgaaattaacatttttattctgcctacttcagtgtgcctgcagtatttacaacgatcaggagtgtgtacttttttcaatttagaaaaatgataataataaggtttgcttggggggaaagggtaagtaggatgagaccaggaagagaagtaacttagaaacacatcatgcatcatgactgctggcaccattctgtcctccaatgaagagcgaggctttgagaggttcagcagctcacccaaaggtgtacagccatggtctcaaacatgcttgcaccctgctgtcactcaggtcctgaagcccaggccacctccaaggacactggggtgctctggggtgcagcctgccttcagatgtttcttaaagccactcctactccaccccacccagtgcaggagccaagattgaggaccaccatttgacagctagttcataggatttcatagcacacaaacacatctttaaaggctgatgaggtttccaccaaattgggatttattggtatgctgggtataatggcagctgtgtgtgcctttgactgcaaagacactgggcaggccagagtggctcctccccatttgatatgtgtgtgtgtgtgtgtgtgtgtgtgtgtgtgtgtgtgagagagagagattgagagagagagggctcgtgtttttctgttgcgaacagtcctttccacgggaacttatattctcctaaggtttgccactctgcagaacttttggaggaaggctttagagtgagaatgtcagtgcattctcagcgtgcaactgtaagacttgcaggaggtgaatgcacatgaaataattctcagaggaagaatatgtgcactggtcagatagcaaaactgacctgtaacattttctacacaagaggatttgaatggttttcgtctttaagatttttttttaacattatgcttagtccaccatgctttattctgtcagaccatttgccatctgcatgcttcatgagaaatgtttttttctcgtgagaaggacgtaagcaatttcgctcctggttgagagtttggtccatagtttcttggtgtctgtgggttggcttctgggcctcgctggctgcagctgatggtgaccagaagggctgttcttgtgagtcattaggggatgggccgctgctgctacctccccaccccagccacctccatcagcactgtgccatactcgcccagaagggcccctggactcatcgcctgcccccatgtttacactttttaataaaatctctagaattgtggcttagacctgtaaacatccagttccaagaagtggctctaaagccctctctgggggcagagtggttgtcagaagcagaccaggcctcggggtctagattccatccttcactggaactgctgggggctggtagtaccccatctgcaaaatgaggttaaaaatacctaacccttgggttgctatcaagctcagagatgctgtatgcaaagcaccaatcagactggctcacaaagaataggccctctgtcaaatgttcatggttgagtgcgggatgtcaaggataaatagctactggttaccagggaattgaagacagggttcttttacaagcaaaaagattttataagagggtcacagaaacagagtgactcttgcccaacagtatcataagcaaataagctgtgtctagatcctaatcatgtgtttagggctctgctgggtttaataagcaacacatagggggtgcgttgtcctccactctcacatccccagtcactagacaaggtcactcccccggggggcatcttactcagaagctctaaaagactttgttgcatgactttggcccttgctcttttaaaatgtccagttagagaccatggcatggagagttttgtatactctgctcccagcatggcaccctctttgcatattgtgggcactcttaaagttatttctcatattgtaatatatcagatatgacttggatatagtcaactagatatttagtgaaaaatgtatcacccccattatcaaaagaaaacccaaagccttcaagtttggcccaactagaaggaatttctggaagggggaagtaccaggaccacacagactctggtcctggcggtgtgtttataagatgcagctcatcatgttggtctctgtcatccctgctaaggctgttcattatggaaccactggccacatgtggccactgaccgctcaattacttaaaaccatttaaaataaatgttgaatttcatttaaaatttaaaattcagttctcagtcacacaggccaggtgtcagggaccagttgccacacgtgggtggaaggtgtgtgtcaggcagagtagaacaggtatttccattgctgtagcaaggtctgccagacaccaagctgctctcagcccatcccctgaggagcccagaagggatatgaacttccacccacctctcccctttcccagttctcagtgccactccttgcctaagtgcacggtaacactcgccactatttcatgtgttgatacctgcagctcccaattttcttaagaggatctgaccctgggaactgatgagggcaccaggagtgccctctcctttgacatgagaccttgagtcttgtccatggggccctggcctggcccttttcatccccaaggctgtaacattctcctgcacaacacaacacacgtgcacacacacacacacacacacacacacacacaaaataatgttacttctcagtcacccgggaactgacatggttcccagttatttccttgcagcagccctccaagcggtaacacagccttggagaaagctactaagtcatgtatccttggggtaagcacacttggttcagaatagtttctgaaagaacaaaccaggtttttgctcaagagggttttgagggactggagaaaaccttagtgcttgttcctttctcttcggttaaaaaaaaaaaatccaacatagtttccttgaaacatttggaacctgaggttttgtccattttgaaaagaagatgtagagaggtaacgtgtttctcacgaaggcaaaacaaaaaaataagatgccaagcaagtggcccttgtaccttcaagaccaagaaataaggcgtttgtttctgggaatgccttccatttgctcattttgtaagtaatcaaggcaggctgagaggggagccttctgaggcaccccagtgagcagaggtggggtcctgccactggcccctcggctccaaccttgcctcactccaggcgctggggcagagatgtgtggttggcctgtctctggagttcctgtgctgcttaatttgagtagagataaaaggccacaagagaagtcgttttgaagggtttgtgaattataggacttcctttcatgattcagcctgactccaggaagtgcagtcacgtgctgccctcctaggggagcttcgccccaccaccagcactcaggctccacttactgcaaaaggcgcgatcaagattcttcttcctgaattattgtcttaacaaaattgatacgtctaaacattgagttaacactttcattcactaaaaatgttttcctgaatgatgcttttcatgtgacttctttatagtcccacgtgaaaaggggaatgtgctcggctctgtgcttgttcccctctgtttgggagcctgcgctgctgctcacttctgcagtcagctctgtttggatcagttttgaaccccagaaccttccacatagaggtgataattctagataattctagagcaactgcttctctatctggctgtatgctaagctctctagagagctttacaagggagagattctgagtgttagggctgggaaaagagcactctgtgtgatcctaacctgcagctgaaatgcagaaccactgttctcagctggagcttttcattgttttttgtttgtttgttttgttttgttttgttttgcttgtgaattgagcttactaatggaagcaggagcttgttctgtttagcgatcgtgagaaccacctaggcagcggagcctgcccttagaatctgcttcactgggctgtactgggctgggcattggcagttttaggacacatctagatgtgtcccaagcaatctgatattttgatgtttatcttacagagaagcatgtgtttagaaggcagatagctgtgcttctgttcttctgattttcgacagagacatcagaaccttccacagtcattttagtctaagtcctgaaatcgttcactgccagccctgagtctagctggactatatgcctctggttggacacgtctgccacctctgagaactgtgtggatgtaactcttctgtcttctggctcgttgtgtttccaaggagaagcttgaggcccagtaatacttaaaaattttttggacaaatttaatcttacataattatggggtacacagtgatattatatctgtacaaggtggaagggttgaatcaagccaattaacatacccatcatcataaatgcttatcattaatcctcctctctatctgcaactttgtagtctttgactgtcatctccttattccatcactccccagcccctggtaaccactattttgttctctgtttctatgagttcaatcattttagattccacatatgagtgagatcatgaggtatttgtttttctgtgcttgacttatttcactttacataactttctccagcttcttctatgttatcacaaacaataggatttccttctttttcatggctgaatagtattccattgtgtgtgtgccacattttccttagccgtttattccttggtggacttttaagttgattttgtatcttggctattgcgaatagtgctgcagtgaagcatgggagtacagatatcttttcaacataaatttgtaaactttcttaaaacattatgagttttttgttttgttttgttttgttttttgcaattttttgtttttggctcatcagctatcattagtgttagtatattttatgtgtggctcaagacaattcttcttcttccagtgtggcccaggaaagccaaaagattgcacatccctgctctagaggttcctggataagatgctcttttaacccctgtagacaagactttttttatttctggaaattttataactttaaacatgtgttttactcctttattttaattctctatttcagggacattaattttatatattttagatcacccctgtctttctcaatttttctgttgaattcctgaagtctttgttaattcctatttcatttttctcaagctccacagatcctgtcccccatgctgcctgcagtgttaatatccattcatttttccctgcttgatataatagccaacatttcttttctggccttttctcctgatctctgctggcttatcattgttttttgttttttgttttttggccccttcctcccttttgagctgttattttaaccaagtgattattctgttaagttctttgattccatatctgtgtgtgtggacatgccttcatctgccttttgggacatttttctcatgaaagtcctttgccatttgtttctcctgttacttctcttctttaattatttcagcatcattgtacaaatccaaggtaggatcctcatctttgaaatagatcatggaagggccttggatgtgttccagtttaccagaatatttcctcccttctcaataatgttgtgtgtgtgtgtgtgtgtgtgtgtgtgtgtgtgtgtgagagagagagagagagagagagagagggtgaaagagagagaatgaattggtttaatacatatttctccccagtgaggctgccagccattcagtctcctctcttcaacactctaagaaatggttggctttccattgctgtgtatatccttccactctgcaggccttgtctgaagtctacagcagccagtccccactaagggtcttcatgatcccagggcaaacatagctgcattgggctccgcttgtggcatgttattgctcaggatcggggtgcccactggttccattttatttctttatctggttcttgttgcagggtcatttcagagaggagggggcagtatctctgccaacacccaagcaatctgatattttgatgtttatcttacagagtgacttagagtatgtggcattgaaaccaatggttaaaaatcaacaaataagcaggaaacaacttcagaatgaccaaaaaagttcctggggcactcttagcttccaccagcctctctgatggtcaaccaggccattttgttggctttgatccgttcagcacattgagttatggggcgcctcccacgtgtcaggagcagggtgaggtatgggggctgtcgcagcagctgagatgcttccctgcacttgacttgtttacggtcagatcgtaaggaagcatgggagcccagcatcaggctctgctcatgcataatctcatttattagtgacagcaaccatagggtttttctttgtgaaaaaaattataaaatacagaacagtgcagtaccacccaaattaataaatgttgttattttaccatttatgcctttatttttcctaaaagaacagtcccaataaagtggaagctataaccttttatggatgaggaagtggagagtaatctgctcaaggctggctagctggtgagcagcaggcctggctcaggcccctctggtgcccctgatttaggcttcatggccttctctaccctgcaggaattatgctggctcagctgtgcaggttggcgactgcaaatatcaacccctctaataggaaaccaggcagatttttctcatgctatcagctgatttttggtatatgtaaataaaacctatgtttttgagagtagcaggaaacattttgttagaaaaccaaatgaatacagggagatatggctatcaggagctgagactgatattataattttccaagtactagtatctgtgtattgatttttacagtaatttgtactttcccatccagcttgtttgtgaccactgaggcccttggtgaatatcttagaagtcactcaaaatggataaagaatgaatgtgagtcacccatagcagtcttatgtgagataatatatggttgatcctcagtattcatggcttctgaatttgtgaatttgcctactcacaatcacagtcatttatctgtaatccccaaatcaataaccatgatgctttcaagaccatttgaggtcatacacacagtgtattagttcattttcccactgctgataaagacatgcccaagactgggaagaaaaagaggtttaattggaattacagttccacatggctggggaggcctcagaatcatggcaggaggtgaaaggcacttcttacatggtggcagcaagagaaaatgaggaagaagcagaagaggaaacccctgataaatccatgagatcttgtaagacttaatcactattacaagaatagcatggaaaagactggcccccatgattcaattaccccccttccttgggtccctcccataacatgtgggaattctgggaggtacaattcaagttgagatttgggtggggacacagccaaatcatatcacccacccctggccccttcaaatctcatgtcctcaaatttcaaaaccaatcatgccttcccaatagtcccccaaagtcttaactcatttcagcattaacccaaaagtccacagtccaagtttcatctgagacaaggcaagtcccttccatctctgagcctgtaaaatcaaaagcaagctagttacttcctagatacaatgggggtacaggtattgggtaaatacacccattccaactgggagaaattgtccaaaacaaagaggttacagggccaatgcaagctgaaatccagcagtgcagtcaatttttaagctccaagatgatctcctttgactccaggtcacacagccaggtcccattgatgcaagagatgggttcccatggtcttggacagcttcatccctgtggctttgcagtgtacagcctccctcatggctgctttcacaggttggcattgagtgtctgtggcttttccaggcacatggtgcaagctgtcagtggatctaccattctgaggtctgtaggatggtgaccctctactcacggctccactaggcagtgccccagtagggactctgtgtgggagctgtgaccccacatttcccttctgtgctgtcctagcagaggttatccatgagggccctgcccctgcagcgaacttttgcctggtcatccaggcattttcatacatcttctgaagtctaggcagaggttcccaaacctcaattcttgacttctgtgcactcgcaggctcaacaccacgtggaagctgccaaagcttggggctttcaccctctgaagccacagcctgagctctacggtggcccctttcagccacagctggagcagctgggacacagggcaccaagtccctaggctgcacactgcatgaggaccctgggcccaggccacgaaaccactttttcctcctgggcctccaggtctgtgataggagggactgctgtggaggtctctgacatggcctggagacatcttccccatggtcttggggattaacattaggctcattgctacttatgcaaatttctgcagctgagttgaatttctccccagaaaatggatatttcttttctattacatagtcaggctgcaaattttccaaacttttatgctctttttttttttttaataaaactgaatgactttaacagtccccaagtcacctcttgaatgctttgcctgcttagaaatttcttctgccagataccctaaatcatcgctctcaagttcaaagtttcacagatctctagggcaggggcaaaatgctaccaatctctttgctaaaacataacaagagtcacctttactccagttcctaacaagtttctcatctccatctgagactgcctcagcctggaccttattgttaatatcgttattagcatttttgtcaaaaccattcaacaagtctctaggaggttccaaactttcccacattttcctgtcttcttctgaaccctccaaactgttccagcctctgcctgttacccagttccaaagtcacttccacattttggagtatcttttcagcaacaccccactcttctggtaccaatttactgtatttgtttattttcacattgctgataaagacatatctaagactgggaagaaaaagagacagttccacatggctgggaggccccagaatcatggagggaggtgaaaggcacttcttatatggcagcagcaagagaaaatgaggaagaagcaaaagtggaaacccctgataaacccattagatctcatgagacttattcactaccatgagaatagcatgggaaagactggccccagtaattcaattacctccccgtgggtccctctcacaacatgtgggaattctgggagatacaattcaagttgagatttgggtgaggacacagccaaaccatatcacagagtggcacaaaattttagccacatgcatattccagacgctccaactcctcctttcacctcatattataagtaagtgtctttttccccagtctacttagtgccgtattttttgcatttttgttccttttttcaaattgtggtgactttgctgtttagagtacccccagctgaagtgctatctggtgtccctaggtgtaagaaggctgtgctgtgccttacagggaaaatatgtgggttagagaagcctctgtcaggcatgagtcatagttagtgctgtcggccgtgagtccaatggtagtgcatcaacaatagatatgaaataaggtgcctttacacagaaacacataaaacaagtgatgcattgatcagttgatgaaaatatggtgacggcaggctctcaggcacataacccctgagaagcgatgggctactacttgctaattcagttttgggggtgactttgtggaatgtataacctgaaataatgagaataaactatattctacttcttttacaaagcaaggaaataatttttaaaagcaagttaaattttactgtttttgtaagagatatgttttcgaaacagttgaactgttttataacacagagaaagtctctttgccttacattttatattagttaattaagtcagcagatttttcttgggctcctgtgatgtgactggcactgttttggtaccaaaagggcattgcaaaaaaagtccagaagtagacagatcacagccttcaggattaaaagcagtctcatcaatgtgatatttcgtttaaacttagtagcaagcccattgaattctcaaaatgagaatctgctaattatcacacacttttcttatgaaagaataatttttcatagtcaatatttctaaaatataatgtctctttctcattagcagagaccgattgtatggcagatttacttgcacctgcggatgctggagataggtgatgatttagtatagtgcacatccaccaggcggtcctcctgggtcccaatatttaggcccacaggatgagtccaggtgatattgggcacaggctcactcagaggctatcagacagaaagctctgcctcactgcacagcagcttcaagcattgccttcagtgggagtcttacttgcagtccacacagctcaggtacaaggcccctgaggtccacacctggagctaatcatctctttgaataacactgtagacatagctaccagaaaataaaagaaatagaaaggcatgattaatacaagcctcactaggttcttattgtgaagatctgagaaagagctcctcatggccctggcatgggagggaagagtgataactgtaaaatacccctaggctttctccatgacaatggttactctccaagggaaaacactttgcaagagccttgtctcagctgggaattcccaagggaattcctcaagttccagcaccctcatcactttatcacttaaaggacaaaaaactcatagtcaacaggggtcagcgcttcaaggaaattgttacagaatggtaaaggggtcgaatatccaagaagacataacaatcctaaatgtgtatgtgcataacaacagagcatcaaaatatgcaagacaaacactggtaagactgaaaggagaagtagacaaatcctgtcttatagttagagattttaatctctttctcacaaaagttgatagaccaaatagataggataaaaatgacctaagcagtactgtcactcaacttgatctaattgacatttataaaatattccattcaacaacagaaaaatacacattcttctcaagctcacttggaatattcaccaagatagagcacattcttggaaaacatgttaacacatttgaaagactaaacgtcataccaattatgttctcagaacacagtataattaaactagatatcaacaacaaaaagatggaggttttgggaaatttcccaaatatctggaaatcaaacaacagacttctatataacctatgtttccaagaagaagtctccaaaatctaaaaaaatattttgaagtgcataaaaataaaaatataatttatcaaaaattttggaatgtagcaaaagcagtgcttatagagaaatttatagaactaagtgcacacattaggtaaaaaatatataaagaaaattacttgtgattctacttttaagaaactacagaaagaagagcaaattaggcctaaaccaagcaaaagaaaagaaataattaaaatgaaagcagaaatcattgaaattaaaaacaggaaaacagtagagaaaagtcaataaaaccaatgttggttctttgaaatcatcaaccaaattgataaacctttaaccaagaaaaaaaaaagaaaaaaatgtagaagatgcaatttaccaatatcagaaatgaaggaaaggtcataactgttgatctaatggatataaaaagatgataaaggaagatcatgaacaactctgtactcacaaatgtggtaacttaggtgaaataaactaatgcttgagtgacacaaactactaaaacttacagaagaaataggtagcctgaatagccctatatctttaaaatttaaattaatataacctttaaaacagaaatcatcaggcccagatgggtccactagtgaattctgtcaaacacttaagaaagaaagaataccagttttccataatctcttccagaaaatagaaatggaggaaacagtttctaattcattttatgagttcagatttcacgtaataccaaaaccagttaaggcattacaagaaaacaaagcaatattacttatatatacaaaaaccctcaacaaaatgttagaaaatcaaacccaacaacgtatgaaaagagctatgtaccacagccaagtggaatttattccaggtatgcaaaacaggttcaacatttgaaaataaattaatgtgatacatcacatcaatgggctagagaagaaaaatcatatgaccatgttaatggaggcagaaagggcatttgacaaactcaaaacactctttcatgtcaaaaaaaaaatcttaaactaggaatagaggaaaacttttgtaacttgataaagagcattaaaaaaaaaaacctacaggtaacatcatacttaatggtgagagactgaacactgtccctctgatactgaaaacaaggtaagactgtcctctcttaccactctgttcaacatcctactgggagccctagctagtgcaagaaaacaaaacaaaacttatacagatcagaaaagaagaaataagacatcttttttcacagataatatgcatgtccatatggagaacttcaaagaatccataaaacaactctaataaccaataagtgagtctacaggatgctagatcaatatacaaaagtcggttgctttcctatataccagtagttaactattgaaatttgaaataagaataattaccatgtataatagcaccaaaaagacaaaaaaaaaaaaacacaagaaaatacttaggtataaatctaacaaaatatgtacaggatctgtatgcagaaaactacaaaataatgatggaagaatcaaagaagatgtaagtaaatggaaaagtagtccatgttcgtacattggaagactcaatgttgttaaaatgttcattctgccaagcttgatctgtagattcaacccaatcccaatcaaaatcccagcaagctgttttgtagctaatgatgaaatgattctgaactttacttgggaaggtaaaagatctagaatacccaacacaatacccactaaaaaggacaaagttggaggactcacactactcaatttcaagtcttactagaaacagatacaatttctgcccttatgggacaaacagacattcatcaaaaattcacatgctagaaagtaaaggtaaattaagtcaaaacagtggtcagtggtacaaaaggaaagcatgttagttttgactgtggggacagggacatgtttatcctgagctcaaagggtagcctggacagtggaggatttttagcagagaaaagggccacagcttagaacatgtaggaagggagcaaggtgggggcactgacagccagagctactcaaaagagatgtggaggaaaaggatgttatgtggttttggagacaagtaggcatgtgtgggaggctgagacgtgagatgggagggattggcaaggggttgactttcagcagtgtagagaagggaatgatctaagagagcttggattttcatcttcataaatggatggagctcttgggccaaggttctcaaacttgagcctttaaaatacaaaacctagagcttcaccccagagtttctgatttggcaggtcagggtggaaccctaagaattttcatatcctccatgtttcctggtgatgctgacattgctggtccagagacgcacattgagaacccagctccagggaacaagaaggagctccaagttaggcaggaaagccccaagcttacatttggatgggttgactatgagggcctttgcactgccacctgaagatggtagctaagagaagaggcaggcttcaaatattggctccaccacatactgtgtgttcttcagcaagccagttgaccctcctgaggctcgatgaccaggtctgtgaattgaggataacaatagtatctaccattagggatgttgtgcacatcagttgataacctttgagtcaagtactcatggaatagctgttttgcattatcctcatcaccttcatcatcatggccattctggccagcactaaagatgtacagccaacctcttctgtggctgaagtttatcttctataaaatgagaacttgtttttcatgaagctgtcattttcacaagtttggggtgcaggtgcagattgcctactgttgtgtttctgaacacttccctcgcgaggctcctaaccccaccccagtaaactcatcaacatgactccttccagcttctacagctctggagagggttcctttttatcttgcgtttccagggatgtttcacggccttttgtggagtgggccctggctgagcttctggcccttcttgagtgtggaggatgtcacagactgcagtgggaaattaaaaagctgcttgcttcacagagtaagggaatgttagtagatgcttgaaaagtaccctgagggagctggtcagaggtgctctgtaaagttgcatctgttgctagcaccatgagcagctgtctgaccaggaggcctgggaacagggacagagagagctggcacccttctttcctctgccctacacattggcctttccgccattaagaccatctctgcttgactttttcagtctcctggctggcaattagcatcttgaggtctccattaagatcttttcaaggatgctcttcctatttggttcaatcttctggttgaatttgatacatgttatgatgtaggactttttaaaaaaacataaaacaatcaggaaaacctcgctatacccattccagcaattcaagaccaagttcatttttggtaaaaacacttgggaaagggcatttccaggctggctaagcactaaatggcacagccctgtccactgactccctcctcaactggtgtgtgttctggagggatccatgtctcagagcattacttcattttgaatgtgcaattaaaagaggccccgtgctgctggggatctcacacttctgctttctggtttgttttgcatgctgacactttgaggaaaagcccatttccctaattacagacatcgtccagcagcaggaagcactctggcttgttgatgcctgtcttgtgctttctctctgtttcagctgttttccttttaagatactcctctcagatttgtgtgcttcttcccttcccacattctatactgcccagcgcctgggattccagatctgcgtttgaatccaggaaagggaggtaggtcaaatttgtgggaatcaagcatatttagaaaccctaacctcaggctctgcgcatctgtgggtgtctgtaggagggatacttaggtttcatgcctgcatctgcgtttcctctcctctgccgctaacattcttccactgagcacatgtccatcttgagctggaaggtttagcggtttgccatcttgtcttgcctgcagttatgatgcagctaaagcatccttctctccttcctataacctatgccactttgctttaagcattgagtatatttatgtctcaggtttatgaaagacaattataaaatctcaggagaccatcataagctcctgtaatatcttgcagtcctgagtcacccacaattattttttaactggctaggaaaaagaatgctagcgattttttttaaatagacattcagtaaaactctagatatttcttaatccacatttactgtgtcctttttgcttaagtcaggtgttttggtttctctagcagctgcaggatccccataaagattatgctcataaggtagtgatggaaaagtaaaatagagcctgaaagcgggaaacttcagcaaggcactaaggcacagacaagagatgttaggtctgccggctgttgtcattgcagtctgctgtggcctcacccccgcccccccccccgccccgcccaggccttcacagctgagtaggaaaggatcttgggatgggtaccagggcaggatcaaggaaagcctgcaactgcgctgcccttctcatcatccatatgtggtttgcccagataaaagcaatatagtaagatctatcaggcatattcaacgtgagttcttttttctagcatcttgttggttgtttgtgtttttccccagagaagagtgagtgatgaggtggccctgggacatggtagatggtgcagttcactggggagacatccttggccccactcagggtcaatatgcgccccacaccgctggctgcaaccccaccctgtcctcttctgctcaaaagagcatgcaagggacattgctaagtggcaattttggttgcaacccagtgttctgttaattattcacaaaagctagctctctttttaattaccaattgtgtgtgcgttgcgtgtgcgtcccttcccccttctctgagcacacctgtatgatgaggcatgtacttcttcctggtggagaagaactgcagagatgtctcccaggttgagcctgcagcctggcccggtcaccagcacagcacggtgacttgactgtcctccctggctcccttccccacccgtggcaagtggcaacttgctttcgctcacactgaacgtggtcaacttgcctccctgtcacactgtagcacttgaatagggcaatattagattatagcagaggttctcagacattagagtgcttaaaaatcacctgggaagcaggccaggcgcagaggctcacgcctgtaatcccaacactttgggatgccgaggtgggcggatcatgaggtcaggagtttgacaccagcctggccaacatagtgaaaccctgtctctactaaaaatacaaaaaattagctgggtgtggtggtgtgcgctgtagtcccagctactcaggaggctgaggcaggagaattgcttgaacccaggaggcagacgttgcagtgagtggagatcgtgccattgcactccagctggggtgacagaataagactccgtctcaaaaaaaaaaaaaaatcacctaggaagctgtttaaaatttacccttcttgtccgtatgccctatttgctgggtctgaggtgggcccagaaccctgctttccagaagggagcctgagggtggggtgccctgaagaccacactcaggaagaaccggacatgtgagctttcatgagccagagtcctgccaagaactagaatctgcaggtggctttggccagtcccacttagaggcaagaagacgtgaggatagtagagaacctggaaatcacgcagtccccaggatgaaagtggaactctcggaccagatccttattctcttactttcgtgagccatttctgcctacctgttgtcagggaggcaggaggttcatttttctctcacatggtgcctgacataatgacttgcacgtgatagatgctcaacaagcatattgaatgaatcaatcagttagattgtaaattaaatgcaccagatgggctggttgtttatttataactacacagttaacatttatattaacataatgttaacaccaaagcgtaatatctgttttctgtgttaattatggcaaggtgggcatagagaagagatttctgagtgtcttttgcagagcttgaaaatgtctatgtgttggttgagatagatcagcctttacttgatgcactttcaatcttttaagttctgaaggcacagcaagagaatttggtgttgaaggtttggataatgttttcaagtatttcaatatccctctatttctaaacattagtaaaaatcatgcctcatgctaccatccttagcttcactttgtgtttctgaattgtgtatctctatatactaagaagtcccccatgtatgcctgcaaatatgggagagtcaaccgctcagcagaatgtgcacaatgtaaggctgtgccttggagaccaggcaccctgtgcagtgtgatgcacaggcaggcctcaggatggcgccgtggagggcaagtgatacctactgacgaagccagtggagtggatgcaaggccaactcaggccctgcagctggggttctgttcctcagtgttgaggccacaggtctgtgtccacatgttttcttttgtacagtgggattctgccgcacaaggcagtgcccccagccctttgcagatgagtcaaacatgcttgtttgcagagcctggtgctgggtggggtggtcccatcacatcacctcttccttggtcatttctctgtaattaatcagccagtccctgaccaaaccagcaagatcaattctccctctggttggactcattcctcttttttttttttttttttttttgagatggagtctcgctctgtcgcccaggctggagtgcagtggcatgatttctgctcactgcaaactccgcctcccaggttcatgccattctcctgcctcagcctcccaagtagctgggactacaggcgcccaccaccacgcctggctaattttttgtatttttagtagagacggggtttcaccctgttagccaggatggtctcaatctcctgaccttgtgatccacccgcctcagcctcccaaagtgctgggattacaagcgtgagccaccacacccggcctcctctttcttatgaaaattaacccacagatgaagtttcctttcacccaagtcttgacaattttctcagcttcaagctgcagaggaaattcctaggcacatcttaacagggctgctttgcattgagggggctgtgtggtttgagcgtgataagcctggatatctttctgcactatgctgatttttgttcccttaaatggtatggatttggcaacaattgtttgcaggtgatcttttcccagagaaccacttatttcccccactgtctctgtatgataggagggctctaatggcccagggatgtgaaagtgagacaccttcaatcgctaaggactgctggaaatgtgaactacaggaagttgagggggctggaggggaggaggcagcacctgccggagccatgcttcagtgggtctcaagaaaagcagaagcctggaatctcagggctgaggccccttgataactaggacagatgggttaataaaaagggatacagagacataggctacctcttctggttcaatgccaagctagaaaatcctgaaatgaacacagatttatgagataggagtaatatatttaagaacacagtcttacatagagataactattttcccaaaacatccaaggtaaatttatatatctttatggatgaggttgggtcttttcagggaaggttggggagacggaagggaaattacttattatcagtcctcatgattcatggattccatatctccgcattcatctattcatttaaatctgtttgcaaccccaaaatcaatactcacagcacttttgcagtcatttgtgacgtgcacaaagcagtgaaaaatttaagtcacccaacacatacgttgaggtcgcacaaggtgacactctgctttcttgttttagctcttataaacacattttcttttctcttggcccatttagtccatggtttttgcatttttgtgcttttctggggtgattttgctatttaaaaatggccccaaacacaatgctaaagtacttactgtctggtgtctctaagtgcaagaaggttgtgatgtgctttacagagaaaatacgtgtgttagggaagctactttcaggcatgagttattgtgctgttgaccatgagttcaaggttaatgaatcaacaatatatatgaaataaatatctttaaatagaaatacacataaaacaaggttctgtattgattgattgacaaaaaagttgtaaccagaggatcacaaaaacctaacaccatatttccccaggagcaactgttcaggatttgcaaattcagctttcatggtgattttatagagcataactattgtgaataacaagaagcaactgtattttgtttcatgcataagatggaaagagaacagaaccagaagtatgatatcgatgaaatggagagaggagaaagaaaagaaagaaatgacactatgaagatttattagttaaaatgttactagtgataataaattaatcagaactttggcctctgcctttgatcctggttcccataatctctaagtgccaggctcagataatgtggcccttgcagggtttgggcagctagtcctctaaccattttctacaggtaaacgtggacatgaaagaagccagggtgaggcaggcagcttccagaagcacacactgggctcagctccttccttcctaacctctattttagctccacgtacctcttcaataccagaaagtcttcttctgattctgccagagcccagctcctagaacctagctcatacactcaccagccttttttgtcaacaattcattcaaatatttatttacttaaatatccattaagcactgttgcttctctcgcccaactccattgcacatgctatatcagttatctgttgctacataacagatcactctaaacttagtggtttaaaacaacaataattacttattattgctcataatttctgtgggccaagcatttgagatagctgggtaggctcaggccctctgtagggttgtagtcaggtgtgggccagggctacagtctcatctgaaggcttgatagaggctggaagatactattccaaggtggctgctcatacggctggtcacttactgctggctattggctagaggcctcagttccttaccacatgagcctccccaaagagctacttgagcatctttccaatgaggcatctggtttccccagagtgagcaatccaaaagctgaggaaaagtgttaagggctttcatgagctagcttcagagacccaacattgtcactctgcagtcagccactctgtgtgcaagggatgggagtaccaggaagtgaggatcactgggcaccatcttggaggctgcctgccatgtatacattttaactctcaaacaaaatttgaagactgaagacccatacttaaagtagcctctgttccaggcagtagagaacaaaatgtaaacgtacttacactaatggagtgtctattctagtggctttggggaatatagacaaaaaaacagaactaaaactctaaggtgggacagggagctgggagtgttagtgtcaggtgggcctatagagctcagccccccttcatcatgttggcattcatgctggctgttcctctgtaggggatgaaattttcccctgccagaagaatgggctctggacagcttgttcagctgcttgctcaggtgtgagcatctgtgcctaatcttccagtcagactgccctagaaacatcatttcttaattagctgaaagggtatctgaaacattgtacttatggtggcaagcatggatctattgctcttcatctataaagttgctgcctgataaggtagaactacacaaatgatagtttcccaactaaatgcattttaaagggcaaaggttgtatagtcagctttagtcctggcataggggaaatggactatggaagtctagttggaagagaagattgaaacatgccagtaagtgcaaaaggatacagtataatttaaataaaacacatggaagacatgaggatgctagtgggatatgatgggctcatccatttctgcaggctccaggagggtggctggcagggcttctttggtgtggggcagaaagaatcaaagcctgtagaataaatctgactccgttctagatttaactcctcatggtgtatcacgtgcaaggtgaagcctgactggcactagggaggattttgaggtaaggaagcattgtctttggttcagtccaagccctcactgactttccaccatcttcaggtgggggtgggcatgtccgtctgtctcccagcctcatgcacacacatgtgtgcacacacatgcacacacatgcatgccttcttatgaagtgtgggtctggctgcccgtgctttttccttcatctcaccatgacttatccttccctcttctattcaaagttcccacttgagagggtccagttgccctgggcacccctccacactccccactcatgactgaaattagttacagtggctttggtatactgtcatcccctttcaccagtgaagaactctattgctatagtgcccaggtcacacaaagctgggccgggtcgccagcgttcccgattctcacctctgtgtccctgggtttcctgctctctggcccagtggaaccacctccacggggtaccattcctttccagccttgtcttttgttcattggcaatgatgttaacaaattaaataggggaatatttgttcatctaatttattggtaaaaaggctagaacaagcttatccaacccatgacccataggccacatgtggtccaggatagctatgaatgtggcccaactaaaatttgtaagctttcttagaacattatgagatttctttcccttcttttctgtagttcatcagctatcattagtattagtatattttatatgtggcccaagacaatccttcttttatcagtgtggcccagggaagccaaaagattggacacccctgggctagagcaataaaatgggcacatcagatttgtgtccacaacagctgacacagtggtttccagtcaggggtaagttacccttagggaacacttggcaatatctggagacgatgtttggctgtcatgattggggaatggggtgctactggcatctagtggggagaggccagggatgctgctcaatagtctgtactagatgagacagcccccgaccctacacacataacagagaaggatccagcccaaatgtcaagagtgccaaggttgagtaaccccgagctaatgtgatgaatggtgccagatggaaatgggtgggaccatcataaggagggggaacagggtaaaggcaaccatcttaatttgtaaattgagtgtgggggatgtgttttgaccacatgcttttgaaaagggaagctgttcattctccagaagcccagcggagatgttggatggatggggccacccatagctgcattcatggacagctggacacgggcccaggaaatcttggcagcgtcactggggccggtgcacttttaagaggagcttgggtgatatgaaattgtttggacaaaatgagtgagaggtcttgaaataatgtcaaggcaggaagaatgcattgacttggagtggctgccaagagcaagcatttgcaggttgttttggggaagcagaactggctgtgttctctttgtcctgtgcacagttggaagacgggaaatggaggaggagagatggggaaggagagatggggaatcagataagaaagtgttttccaacagaagcatcggcacacattggagtgagttcccttcccttaagaggccaggagcttatgtaggaaccaagctccatctgaagcagccacagggctggagcatctcgcagattagttgccagggttctctgattctggccctgttagcctccatctggacacacagcaattgcatgtttagcatttttattacaaaagcaacatacaattttgacccttgaacgttacaggtttgaaccatgtgggttcacttatatgcggattttttttcaacaaaaatattggaaaaaagttttgaaggtttttgacaattttaaaaacttgcagatgaactccatagcccagaaatataaaaaatgttggccgggcgctgtggctcacgcctctaatcccagcactttgggaggctgaggagggcagatcacgaggtcaggagatcgagatcatcctggctaacaaggtgaaaccccgtctctactaaacatacaaaagttagccaggcgtggtggtgggcacctgtaatcccagctacttgggaggctgaggcaggagaacagcgtgaactggggaggcggagcttgcagtgagccgagattgtgccactgcactccagcctgggcaacagagcgagacttcatctcaaaaaaaaaaaaaaaaagttaagaaaaagttaagtgtatattgaatgcacaaaatatatgtagtctattttttcatttactaccataaaatgtgtacaactctattattaaaattaaaatttatcaaaacttacacataaatacttatatgccattcacagtcgaggaaaatgtaaataaatataaagatgcagtattaaatcataattgcataaaattaactgcagtacacactgtactgctgtaataatttcatagccacttcctgttgctattgtgatgagctcgagagttgcaagtacctgcctaaatcactgtgtgatgctcatcatctctgtgtgagcagttcatctctccagtaaattgcatattgcagtaaaaagtgatctttaataagtgatctcttgcagttctcaagtatttttcataatgtttagtgcaataccgtacaacctgaataacaccatgggtcccatgtgaagggtcacagtgaggctggaagtgctcccaagaagtcatgacattataagaaaaagctgaattgcttgatgaggattgtagatggaggactgtagccatggttgcctgccatttcagatggatgagtcatcttgtaaacagatgacagtaaatttatggtattgataaatacagtacagtattgtaaacatatattctattccttatgattttcttaatgacattttcttctctagcttacctcactataagaatatagtatatgatacatataacatgcaaaatatgtgttaatcagttatttatgttataggtaagccttctggtcaacagtagactattagttaagttttgggggagtcaaaagttacacatgaatttttactacagggtgggtggtcagcatccccacattgttcaagggtcagttgtatattcactgtggaaatcctaaaaagcaaagagcaacatgtttccatcaagcaggattttgccagcctctggttaaaccctgaagcctgagcaaggcagtgaaatctccagacctttggggctcacattttagggaaagggcaggtttgtgttgatgctacaaaggtaatagatgcttttgagaagttaactatgtgcgggggtggccaaggtaggccgaagcagcacctgagactggatcatcatgatgcaactctctgagtaaaggcctgagaaggaggaagccaagcaggaggcaggagaggcctcaacctggaggcagaagcacagtgtggtggagatagtgagcaaggtgaggttgcaggtctcgggcctggtcaaggagagccttgtggaggagcaatgaagatttgcgatgtgatgtggatggagaggttccttgtgagcctcactccaccttcagggtagggaattgtcagtaaggaaaggaaggaccaggtgagacttccaatacctgagagatggcggtggcttccacgagggcagcctcaggagctatggggagacatgatggcttgggaatatattttaaagaaaagctactcagaggacctggagaccagctcatctaacctgcttcaagattctccatccctgtgactgcatcagatggagctcagctcctgcacaagctcatggcttccctgcatcactgtgagtggccaatgcttctggtagaaagcacattcctttctgacttggtgagagggaagactcctgaaagcagccagggtctcatcctcagcaactgtggtgctcaatgtcatttcctcaattaggagagactgagggaggaagagatttgctgagggagtggcaggaggagtcaaaagcctcatctggagtatgtggaggtcaacttgtctgttacacatccaaggggggacgtcagataagcagacatgcagatcaggagctcagtggagagaaataaatacccattaaccaacaaatatttttgatgacttattctgcactaggagctgttccaggcatggtgatatggcagtgaacaaggtcatcctattctcacctcccagagctggccctctggtgggaagaacaagacaatactcaaattcaacagtgaatcatgatttaaagggctgctgccttatggagatgtgctgcagagaaaaattaggcagggaagggaggtatgcggcccaggacattacagaagattatttcatgtcaaaaaacatttttctacaactaagtgcacatttaacttgtgtcacaaaaaaggtctcaaaagagcaagggatttgcagtgttttcaggagctcaccagacacctgaaaaccctccttgctgaaccactacctgcccaggtgttcactgaggtgccagacccagcaggctgaggggtacaggtggagttaaggaggagctaagtggcctggtttgtttctcagtttcgtgctttggaatgaagtagtgtcacacatggaaaaaaataactgggaatgttgaattaagaaaaaatagggagcaagttctaaacactatttggaagaaaatgatccctgggaatgctaaagagaatttgagccatgagctgttcctgtagtcagagttaagcattgtgagttggcaaaagcatcaggcgggaaggactgagtctgtgtgtgcaggaggaatgcctgcaggggaaagtcacgggctccgtccctgtctcagttggtgggggtggcagagatgccacagccgtggccaagactacgctgggtgaaaagtgagactctctggatttgccatactgactgaaagctgatatctgaaaagtggagctgagaacagcagcctgggccactgtgggcagtgactggaatggagatggccatttcctgccaaggtggcctgagaaagaggaggttggagaccaggacaaggccccgggtgggtgccggtgggtgccagtcctgagaaggtatgcacaggaacaccatggacattgtttattcccccaattaagtagcccaaaaatgtgccataagctgtccttgcagtgaaccagtgattctgcccaaaccatcaccaccaacatacccaggtcaactccggcacaggaagtcacatggccagaaaagggccatcagccacatcggtgctgacactgagtgcagcacattcttctgccacctgcttgcgaacatatctgcaatgcaccatcaaagccacacagagtgtccctggcgtgtgcctggaggttgctccgggtctgcagatgctccccaagacccgaccacagcctgtctcacttcctttccattcacttcaatatgggattcatgcccaagtgccagcaccgatgtaatgattagtgacaagccaatgaatttttaaaatagtagctatgttaagatttatatgaattaaaaagtatttgctctcattttatttaaaattttgttcctacaaagttactgtctcagtttgagctgatggtgcagtctgctgttctgcaactacataaaaagtaacctgggccctgcagaggggacacaagcatcggggccaggtacacagtgacaggggtatttgagctgggtctgtaaggatgactgagatggctgggaggaagagctgcacgcctcagcagaaagcacacgtggtgagaacaagaagggaaagccacagcatcccggtgcagtccagtgtggtctgtggactgggcatgttggaataggcaggaagggctgatgtgcgctttgagggaggaccgggcagctggagagggaggcgtcaggaagcaggagggcagaaggtgaggagtgaagggcagcagtggaaaggacagggttacgccaagcagtggtcatggatatgggcagtaaggaacatgcaccaagggcgcctggaaaacgaaccttagagaacgcaagtcctgcggaggactcctgggttcctggctgggacaccgcctgggcagggaaggcagagaagatggagaacctggtctcaggtggcatcagaacccagcatccgcatcaccaggattgcaggagcagcagcgtctcaggccctgggtgtgtcagagcccccaggccacgtggaagtatgagacgtgctgggctgcaggggaaacaatggaaatgaggttggaggcccgagaagacccactgcaggaaaagggtggagtgggggaaaagcaggctgggggcagtggctggcctgcaacaaaagcattgtagaatgcaggcgtgagccaccgcgcccggccaaggcgggcagatcatgaggtcaggagatcgcgaccatcctggctaatgcggtgaaaccccgtctcttctaaaaaaaaaaaaaaaaaaaaaactgtagaaaggggaaagcagtccaaagagaagtatttcttccaagagactcatcagcacactgtgtttccagagatgtctttctgttaacagcattcttagactcaaaagtaaatgtagatatactttaaaaaacaaaaacaccttgctaagagatgaatttttagaaacttgttggacaaagaaaagtcattgatagtcaactgctgtgagaggcaagccaggaaatgatgattaataccctcaaattataataaaacccatgcctcattaggggctcgcccaggagtactgacttgtggatagacaccgtctggggaaaactctgtcgcctgtgtcaggctgatgctcttacattttatagccccttgtaggatagtgcatgttgagaagaagccgcttcacatcatcgtggtgcaggatctgtggtgtggtgtgcttcatgtgtgtgttttgtgtgtgtagtgtgtatgtagtgtagtgttagttgtgtgtactatggtgtgtgtgtggcatgtatgtagtttgtgtgtggtgtgtgtgcagtgtgtgtgatgtgtgtagtgtgcatgtagtgatgtggtgtggtttgtgtgtgtttttatgtgtagtgtgtagtatgtgtgttgcatgtagtgtgttgtgtgtcgtgtgtatgtagtttgtgtgtgtggtgtgtttgcagtgtgtgtgggtgtgtactgtgttatgtgtgtaatgtgtatgtagtttgtgtgctgcacgtagtgtgttgtgtgtactgtgtatgtagtttgtgtatactgtgtgtagtatgtgtgcagtgtgtgtgtagtttgtgtatgacgtgtgcagtgtgtgtaagatgtgtgtagtgtgttgtgtgtgtagtgtgtatgtagtttgtgtgtgtgtggtgtgcgtttagtgcatgtgtggtatgtgtccatatgtgtggcatgcatgtagtgggcatgtagtatgggggtgtatgtgtgtggtgtagtgtgtgtgatgtgtgtagtgtgcatgtagttgtgtggtgtgtttcgtgtgtgttttgtgtgtgtagtgtgtatgtagtgtagcatgtgtttagtatggtgtgtggtgtgtatgtagtttgtgtgtgatatgtgtgtagtatgtgtgatgtgtgtagtgtgtactgtgtgtggtgtgtatgtattttgtgtgtgtggtgtatgtgatgtgtgtagtacatggtgtgtgtagtgtgttatgtgtgtagtgtgttgtatgtggtgtgtatgtagtttgtgtgttgtgtgtgcagtgtgttatgtgtgttgtgtgtgtagtgtgtatgtagtctgtggtgtgtgtgatgtgggtagtgtccgtgtagtacatggtgtgtgtagtgtgtgtggtgtgtgtagtgtgttgtatgtggagtgtatgtagtttttgtgtgttgtgtgtgcagtgtgtgatatgtgtagtgtgttgtgtgtgtggtgtacgtgtagttggtgtgtgtgatgtgtgtagtgtccatgtagtacatggtgtgtgtagtgtgtgtagtgtgttgtatgtggtatgtatgtaatttgtgttgtgtgtgcagtgtgtgttgtttgtagtgtgttgtgtgtgtggtgtgtatgtagtttgtgtgtgtggtgtgtgtgtgatgtgcatagtgtgcgtgtagtgcatggtgtgtgtgtagtgcagctgtggcatgtgttcgtagtgtgtgtggcatgcatgtagtgtccatgtggtatggagtgtgtgtgtgtggtgtagtgtatgtgatgtgtgtggtgtgtggtgtaccgtatgtgatgtgtgtagtgcgcatgtagtcatgtggtgtgtttcatgtgtgttttgtgtgtatgtaacgtagaatttggtgtgtgcggtgtgtttcatgtgtgtggtgtgtatgtagtttgtgtgtatgtgtatgtgtgtggggtagtgtgtgtgatgtgtgttgtgtgcatgcagtggtgtgtttcatgtctgttttgtgtgtgtagcatgtatgtagtgtagcatgtgatgtgtgtagtgtgtttcgtgtgtgtggtatgtatgtagtttgtgtgtttggtgtgtgtgatgtgcatagtgtgcatgtagtacatggtgtgtgtgtagtgcaggtgtggcatgtgttcatagtgtgtgtggcatgcatgtagtgtgcatgtggtatggagagagtgtgtgtgtgtgtgtgtgtgtgtgtgtgtgtgtgtgtgtaccatgagggacatgcgctttgctccctggataaatggatggagtcatgtagataattttccattcacgaccagccccttttggttaaaatgtgcctccttggatacttttggggctggcaatatgtatccttctagtttacaaccatgattgagagggaatactctccatgttaaatatgcattggccgcctttctttttgcttctgaaatgtatttatttactgcaagcagtgtctctcctgtgtcagatgtcctcgtgggctgggaaccggcactatctctttagcacgggccctgcagatgggaagtggcgttgcccaggaagtggtctggagaagcggggagaagacagcctatgggccccaggcctcgggagccagggagggtgtcactcttcatgtctcaggcagtggcttgttgctatcatagccccgggctggaggtgggaaggccttatggtgaccacaagtcacagttccgtgtgggccctcaacgtggcctcacttcacctctggggctcagcaccagcgtgtgactgactgctcgaggcagcgtctcgcagctcaggtgggtgaggtggtggtagcgtcctccttggtaatatcactgtgatgaggagcaaggcttctctaacattgtctggactcaggaggagcagttggtttgttctcatgtagattctgcctcctgtatgctgctgggaccctgagggtcagcccaagagtcctgttttgcaatagcccttctgtttgcttctctttgcggtatgtttatttttagaattctttgtctttccccactccccccaaaaaagaattatttaatttggtcacttccatcaaatgctctgattttagcttagttagaaggcatgctgaaaactgtaatgatgatgtgaacagaaagacaactgtgtgttgggagggccaaagagggaagtgcctttgttcagagatgggagggtttgtctccactttgaaagggtttgagtggttttagcaaacgttccctgccacgtggggtcctcaccaaagttctctgtctctgtcttgcccaggtggacacctgcgcaggtgtgtgccctccggcccctgaagcatggccagcagcggcatggctgacagcgccaaccacctgcccttctttttcggcaacatcacccgggaggaggcagaagattacctggtccaggggggcatgagtgatgggctttatttgctgcgccagagccgcaactacctgggtggcttcgccctgtccgtggcccacgggaggaaggcacaccactacaccatcgagcgggagctgaatggcacctacgccatcgccggtggcaggacccatgccagccccgccgacctctgccactaccactcccaggagtctgatggcctggtctgcctcctcaagaagcccttcaaccggccccaaggggtgcagcccaagactgggccctttgaggatttgaaggaaaacctcatcagggaatatgtgaagcagacatggaacctgcaggtgggccacagctggtcctgctccctgggcccagggggccctgtgaccccacacagacttcctggctacatgcaacacatgtgcctatgtgccctgtgtgcccaaataacacaaccatctccttaagcatcaattttggccaaaaaatgcctctctctgataagagcctttcctctttcacagccacagctgagagggtgggtccctttgtgccagcagtgtgggtttctccacagcagggaaccactgttacccagtgcaaggagggccttttcagagaggcattgataggtgttgattggtttctgtttatctgacaaggtcctaccatacacactgataggcacttgattttatggcttcctaatatctcttgcagaactttctgtgtcaacactcatatagttgcatcacccgttctttggctatctggtatcacctgctatgcaccacaatttatttaactagtacctattgatggacacatttgctgtttatgaataaacgctgctaacaacattgctctagacctatcgtatactacacttgtatgcaacgtctgcaggataaactttgaaagggttgggattgccacagcaaaggatatgtgtgtttatttttttattttttatttttttgagacagagtcttgctctgtcacccaggctggagtgcagtggcatgatctcagctcaatgcaacctctggctccaaggttcaagcgattctactgcctcagcctcccaagtagctgggattacaggcatgtgccaccacacctggctaatttttgtatttttagtagagatggggtttcaccatgctggccaggctggtctcgaactcctgacctcaagtgaaccatcctccttggcctcccaaaatactgggattataagcgtgagccaccgtgcccggccatgttatttttatttatacacttgaaagtacttaagtaatgtgtaaaggtctttctggttttatttactgaatgaatgagtgaataagttttgatcctgttttaccatgccaggactcgagatagattggaaatgccttctgcatcattttcatttttcctcggtatggtttactctgctttgctctccatgtggcagggtcaggctctggagcaggccatcatcagtcagaagcctcagctggagaagctgatcgctaccacagcccatgaaaaaatgccttggttccatggaaaaatctctcgggaagaatctgagcaaattgtcctgataggatcaaagacaaatggaaagttcctgtgagtatcgtgccttccccctcacctcctgccaccaggcctgtgtggacaattgggaataattcagcttccttgtgactggccccacatgaccctgggaagaggccatgcattgccatttgacaacatgcatgctggcctgttctaaagacatttctaaccaaagctatcacttgtgacccagtgtttattttgcccagtctaactctaaaatgaacactctttttgggcaccgagggatgtaatatttaaagaaaatgtgattcagccccatattctccttttaatggcaaattataggttgcatagcacattctgtggttatccaactaaaattaaaatactgcagtttttttactcaaactacccccttgatctcagactttacttctattttacatgaaacaagatgccaacaggaaagatgttaaggaaaagttcctgggagtagcatccatgagtggtgagtgcaggtttgaagacttcagccttaggcccacagtcattagagggtctgtctgaatcctgggttctgtttgctatcctcagtggttcagtgtaaatctaaattgtagaaggttctgagatacaggccaacgtggtcagtcagttgtccagagaaggtaaagaactgtctttgggaggtgtcaaccttgttccctcgagggggtctggtcaaggtggctcagtggggcagttgtccctgggggaaatgatcccctggtcacctctcagtgtccctacagagatgcttaccttggaaacataaccagaaacagcgatgcagcctcatggtttggcaattggtgaatccccagccgacttcgtaaacttttcctagatttagaagcgttttctctgcctgtccatctattcaaaggaatttcctcagacttcactgtcataccttgtattttaaaaatgatcttagctgagtgcagtggcacgcacctgtagtcccagctactcctggcaggaggatcgcttcatcctcactatgatctcactatcgtttgaggctagtttgagaccagcctgggcaacatagtgaggccctgtctcaaaaaaagaaaaaaagaaaagaaaaattgaccacaatactcttaaaaaaaaaaaaaaaaaaggaagaaggaagagtggcccaggttgccacgcggcagtgcctagagtgatggtctttagtgggatgcagccccagccagcagcagaatgctgtggggagggaagacattgcccctcagtggaggcacctatggctatttttgctgaggtttggcttcttaccatctcagcaataatttccaacatgaatgtcatgggaccatgcacatagcatcttggcatgtgaagtcaacccaaaatagcataatccacacgatgaggctggccaacttctgctggttaagaagcctgctcatagcctctttggccacgaagctgtttcttttttcggagttgtctattcccgaaaacagcagttgcatccttcatggccatgacttttgctctctccttcctttctgggagatgtatataaaccccatgcagaaggctgggaggtgcagctcttgtttgatgaacatgccttgttccctatctgccctgtacagactgacatctcatgtgtcctcacagcacatgtccctgacactgaggcttatggtttatgcaagagagtctcaaacttgccgtgcttcctattcagctggtgtcagagctaaccaggcatgggcctgtgagagaggggcctgggcttctgtgttttcatcgagcaccctctccttagttgtcttcttctcctgggttcttattcctgggttcttattctcctgggttcttattccactttatattgcagttgtccagttatcaccccataattgccaacctcccagataatagcttccaaggctttctcccttgtgttgtccacagctcagtcccacaccttcccgtgctccctccacacctgcagggctcacctgtggactgatggtgcatagcaccccatgcccaggcctggcatcaggcagggtattagtgagagggaagagcagagctaagcctgggcagcaagacccagcttcagaacccatgttcccatgatggttgtagaaccttagactaagggaaactttccccaggctctgctcctctgggtctgtgactgtcttgaggattcaatgaaaatacacaccacgtacaccgcacagcacatgtggtcatcactgatgtagcttttcttctctcttcagtgctctttctccatcatgagcaccaggaaagtctccttgtcagggtatcttatggtgtttttaacagagaaagtgtgaggaaacaccttggaggggtttgccacctggcaatttcacctcttgacaacctttcatctcctacagaacctggctggggttcttggctgttgctgggtgtgtaaaccttccttgttgcagtgtagtgggcgtgttatactgtgagtgtttgaatatggttgtgtatgcttgtggagagcagggagagtttgccagcatactggatacagtccaagtctaccatgcttccagcacggggcagggtctgcatccctgaatacaacgtctcccaagtccaggttgcctagacgttggtccagattctttcatctttagaagtgtttgtttgtgtgtttctttcatgggaaatagagctaaaaggctccagggaactcttgtaaaccatcaccagatcctgtggctgccctctcagtgtgagtgcgtcagctcctgattcactgtgggagtctgtcctatattcccctgttgggtcaggccaacgttgcaggaagtcccagacctggttttgaatcatccaaatctgccctacttgcagatagttttataaaatgcacattatttgcaacgaatagccacagcacaaggtctttggagtcagaactagattccagtcactgctggatgtcctcactgagccagctgctgtttttttcccactgttcttctcgggccttcattcagattctcctaacgaatgtgctcatgtctactttccaatcatcatgtcagctaatccatccatggaccaacattactggagtctgtagttgcatgaagcactaagtgccaggcaccattctggactttgggaagggagaagtgaatcagcaagcacctgccctcatggaccctgcatttcagtgggagaaaagacgctgaacaataggaaagaactgcatttaagtaagggcgtagagcacactggggtatggatgctgggtcttctttctgctgcgtggggaggatggaccttgctgtgagggaggccattgagaagaggcctgaaggcagcgaggaaccatccccacccagggaatggcaaattcgaatgccctgtggcaggagcgtgcctggggagcagggcacccacagaggccagtgtcactggcagagagtgagtggagaagggtggagttgagggccaggttgcagagcactcacggcactgggaggaccctgctttgggcaagttgggggggctgtctttaggaagcaaagggccagggccagctgacattcggtgggctctgcctggctgccacatcatcggtttgctgtggggagttgtgcctgtacatatacttgcaaaccaaatgtgttgatttttttatcgtgatttcagggccttcactttctcatgcctgagcatcagtcagtttgtctccgctctgatctcctgtccaccccacccaccgtgcttttacctgggtcctgtacaggcctgtgggctggcccttaagaggttttcaatgaatgcttgtcacctaaatcaatgaattgtttggatccattctccatctcccagctcgtttttgctttccacttcctgacatgtagtaataccactgtagttctgtatgggggcagctccacacctgtctatgttggggagggaatggggattcttgcacctctttctacctcctcttaaatcattactgatggacagatgcagggacacagcaatagatatagaaatataaaaacatgacactgcgcactctatggtttgtaagattcactttctctgggtaggaggcagtgtggcctgttaacaacataccattcgggttgtctggcctcaaatgctggctccaccttatcaccagctatgggaccttgagcaagttactcagtggtctgtttccttcatttctttgtctgtaaaatggctttaatgtcatctctgactcttagagtcattgagggttatagagtatcataaaccgaaggcctgctgcacggtgcttggcaccgaacgaagcagcttcaccccactcctgcagtggcctggaccacacttggatacatcagtaacatacactgaaggtcaggtcctccatgcaaactctttccatccctgcatcacaggtgtaccatgacctctgcaggtgagtcattcttctgcaggtgagaaaaccaggcaggtcccccttatccttcccttctcttcttcagtctgcagtaggtgtgtttatttccactctgtggctatgaatagatagagtgagagtcactggccataaaaggattcacactaggcttttgcttttatgaagtgacagacttaaataaagaataattatttcggccgggcatggtggctcatgcctgtaatcccagcactttgggaggctgaggcgggcaatcacaaggtctagagatcaagaccatcctggccaacatggtgaaaccccatctctactaacagtataaaaattagctgagtatagtggtgtgtgcctgtagtcccagctacttgggaggctgaggcaggagaatctcttgaacccaggaggcggaggttgcagtgagccaagattgtgccactgcactccagcctgggcaacagagcaagactccatctcaaaaaatatatatattattattattattatttcacagagggggttggaagtttatttttgcattgcaagccataaactaatcaagaggattttactagtttggtggataatatgggtaaacaaaatcccagcgattactcttcacactttcatcgtgagtaccaatatgctgtctccaccattcagatgccagcatttcagtctgagaatcgctttacgtggaaagtggcattggtaagaattggactaaaaggtaaaaaaaaaaaaaaaagaattcctgaaatgcatgcacctccatagccatcacaaaatgcctttgctcaaacagaccttgaaaacactgagggtaaggcagcatattttggagatcaaaatctgattataaatcctaggtaatgcagttcaaaatgcagatgatggaagcagattacgtctgggagatgctgtccaactcggatcccagttttctctcctcagaactatatgtgaaatccacttacagtgagagtacacctgagctagagggcatttaccacttaagggggctaaacttattgtttttcaaacaagaactcgggtgtggaggagcttgtccaaggcaggaaggcaaaaccaggtccctgatgttgtctggggctaagcagaaacagcagccagcaaccaaatccatctccagatggatccatctccacaaccacaggcccctccctattccccatgcaagatgcagcaccagggcatgtccatgtgaaatctcagaacacacagaggcgtccatcagctttcccctctcttgtgtcctgtccacagagcttacccacaccattcaggagtgactttgagaaggtagttacagggcctttgcacatgtgcttgaagaataacgaatataaacagaggctctttgtggaggggctgggcagtgtgggtcagtggttgtccctcacagccgcctgtggcatttctggaggtgatgttcatcacctggcctttgctatataagcactgcccttgtctggggtctagctggccagaagcgagcactggagggggagtcctccagcccacgtttggtgggtgagggtcagagtgctgccttgttggtgacgtcagggaccaaggcaagggagaggagctgagtggggaaggagatcccctgcccccagaggccttgtatagcagcacagtttgctattttgagaagctagtcacagctgtctgtgaaaaatgaatttgttaggaaaaggaaacaaagcttactttataaaaattatatatcccttccccaaaagggaggatccaggattgaggggtccgaagcatatacaatttgaagactctcttatttttttaaaaatataaaattaggcatacaatagaatgtattttttggactaaggaaaaaaattcaataaattagaatttttttaaaggctggtcaatactacaagcatacaaactttagaaaagataatgtaatattttaattaactgcctgacacgtctctataacaccttttgtttcctccatgtccttgacttcactgtgtttgactacatcttagttcaacaatatttaataatatatttgtctatatatagaaaaagagactattcattccttcctctaggttcacacttcattattaataatatcatgtacatttttagaatccttgtcaaatttgggaggggaagataaagtagaacagagtgagcttccctggctgtgactaaaatatcttttgcaatctgtacaaaacctaaggccgtgcagtcacattgctgggctcctcttggtctggaggaggctgtgatcaactcctctctgaccctcatccacttggttcacacaatgtggtttattgccattgtgcacagccaattctcccacacacatcgctctgctaaaatgtaatgggatgtggccttcatttcatcttataaatgatcttagaatggaaatgctctaaaaagtccatgccaggcaaaattttaaagatggaagtattgtttctttgtattaagtgtattgtttttggctaagagtccttgtaaatcttacaaagccaagaacaatttcaaggtgacctttaagacacataagtggctgctctccaaatagctcgattaatgttaaaaataaaaggtagtatttcagatttgtggatggagtcgtccaaccagtaagtcaccaatgctattttaactacagtttctaccttctgactttagaaaaaaaagttacaaaaacagtcattcattcaacaaaataggcatgttttcaaccagacatgcagcaggcattgtgataggacttggctactgtgaggaataagtcagaccttagtccctgccctcaccggactttgactgcagggggaagatgacaaacgcaagctgatgtgctgcaaagtctgcaatgcatggcagtaggtcccctccaccacgacactgggcctacgcagcatgatcttgattttgttttcatttacttgtttatagtccccacccccacttgtgctggatgcacaagggcagagatggggctgttgccttcacgagtgcaacccagcacctagaacatggtcttggtgggaaaaatctctctgggtaaaggaacattctggctgctaacttgaatggtggccactacttggataggaggagggacaacatggttcatcgggcctgtctcaggtgcccaggctggactatcatctagtgtgtcgctaactataggaactgggaagtggccttcagagcaagtgggctgactggatttggcagagcttgacacctcaccaggcagatgcaacaaaagagcagggcagacccagccatcccattactgggtatatacccaaaggactataaatcatgctgctataaagacacatgcacacgtatgtttattgcggcactattcacaatagcaaagacttggaaccaacccagatgtccaacaatgatagactggattaagaaaatgtggcacatatacaccatggaatactatgcagccataaaaagtgatgagttcatgtcctttgtagggacacggatgaaattggaaatcatcattctcagtaaactatcgcaaggacaaaaaaacaaacaccgcatgttctcactcataggtgggaactgaacattgagaacacatggacacaggaaggggaacatcacactctggggactgttgtggggtgggaggagcggggagggatagctttaggagatatacctaatgctaaatgacaagttaatgggtgcagcacaccagcatggcacatgtatacatatgtaactaacctgcacattgtgcacatgtaccctaaaacttaaagtataataataataaaataaaataaaataaaaaagaaaaaaaagagagcagggcagcaagagattcacggggtagcatgggtatggtggccagggcaggcctggatgcctgcaggagagggagggaagtgaagcggtggatgccgagtgggtgtgcaggagcccgggcatctacagaaccccagtccgagccccaggaggcagcaccatgtcatggtcacgtggtgccctgagaccattttggtgccctgagattctatggatggtggcagagttttccttgatggtggcagactggccgggtggtggagggattggcacgtggctgccccaggccacaccatgaggtgttgagagagatcctggctgctcagctgccccgagtgtgcagcatggagcaggggcggctgctctgacggctcacagcaggagaggcacctggagagctgggctgtgatcaggcccagtagtttgcagatgtctggagagaaactgagtcagagaggaagcccaggaggttgtgagcctcagcgatctgagaggcatgcatgttgaagagtgagtgaggaggatgggaagcctgcaggcttggtgggtcctaaagttgcaagaacatcactgtcccctgcagctaagtgggcctgatgtactccactcaggccacagttgctgtacatgatctcttgggaccctagaagtgctcctttccatgatagctctttaatacattagttaaaacgattcccaggaagcccttgttccaagtatgcaggatcagataaaaagcgcagaaaccctcagagcagggaccgacggtgagtgcagtttgccctcagaggccttggtagtcaccccttcccaacccccatgccaccactgaatccccatgtggcttgttcttatatgccctgcagctgaaattcaggtgccctcctgaccttccttcccctgtccattttgaaaagaaataagcagtgtaatctttgagtcatcccttttgtactagccaagttccaggtgcagcatgacacactcgttatctccacctctcttctccccttcctttccctcatgtctgcacacactcccatcccctcacttcttccccctacagcccgcctctctctctctcacacacacacatacatacacacacacacacacacacacacacacttgagaaccgcggctgcatatcatctcctgtggacctgtgcacaacctgtggggcccaacttaaagtactgcatccattctccgtggtttatcctaatttaggtttgtttcctggtcatatagaatactgaagtatatgtctttaggaactgtctcaatttcttagagaaatgggatatacgtgaataaaatttttatgattcccttatactgagtcccacttgcactgcaaaggattaataacatctgtttccaaagcaaggcgtcacctgccatgcaagccacctgctggggaggggaggtgaagggtgtgagcattggtgagaggtgttgttctcatgttcaaggtgacaggtatgttatctggtgtccccaggctgggtcccacccagggcctgctcctggacgagggctgtatggctctgatttgcacacccctgattctggtggacacaaccctttttcttagaaagccagaatcactgtatcttctagtccttagctgcataaaaaaatggggtgcaaaacttctctggactgtctattcttattgttcattggtttatcctgcagggccacccatggagcccgtaacttaagatgcacaaatgagctattgagtgaatatgtgtgtgtgtgtgtgtgtgtgggtgtgtgtgagagagagagagagagagagacagacagagaaaaagaaagaaccatctggagggctggcaaaagcacagatgtctgcgttccatcccctgagtttttaattcacaggtctgtgtaaggactcttccatttgcattcctgccaagttctcaaatgatgctgatgctgctggtctggggatatggtgtgagcctgtttgagatacctgttacctacctgggctggattaacaactatgatcatttgagattttcatagttcattggagggtctgtaactgcatttgcagttgcaattcctgcaaaatgcccaaatactgtattattggactggttccgataaagttatctttgaaaatgcctctatttctagaaacttaagttagatagtaaagaaattcaggccatgagtcagacaggccctgccacttaatagctctgtgatttggacaacttaattttgctctctgagcctctgtttcctcagtaataaaatggggagactgatgttttatctgagtcattatggagatgacttaagtaatgtgtataaagctaagccaatggttctcatgtctctgtggttcctacatccatgaattcttttctttcatcagttctgaaaaacatcttgctacttttttcttcaaatattgctctctgttgttcttgcccatttcttccttcagagactcctattaaatacagtttgaccttctcaattcatcctttatattttttattttcccttgccttttctgtgtcctgtgctatgagtaacgtcgttgaattattcttccagcgcactaatttttccttcatttgtgtccaatctgctcttacgctcattcactgattttttttaattacattttttagaaaatttctagcagttctgtttgtttgtttgtttgtttgttttttcaaatatttctggggcatttttagagtatcttattggttgctaatttccatggttccgttttttattttgttaaacatttcatagtttatattctatatctgattattctactaccgaaacttttggaggatgtaaatctctctctctttccctccctaccccttttctcataactcatgcttccttatgttttcagtgatctttctgagcttatgcctgattgatattaatctgtgggaatcctgagtattcgatgctgggaacactttcctccagagttgaaggggatttcctcttcacaggtccttgctttaaggtgggaatcccacatccaggtgctcactgggctgctggcctgagattctgtccctgtccacagctgtgctgatattggcattggccctttggccaaacccactttaattgctctcatttgccactcactttttgctgttcaagtttcaactcactttttgtcctatacttcaatttcaaaagtgaatttgcggcttaggaaaaaccttttccttgttcattgaggaatgagactgtgttaggctgtcacgagcctcctttgccacaacaaaaactctgttccatcagtgctttcatatgctgccgtaattgatcaaagtatgccattttatttgacacatgtggttttgcagacctaggtcatcataaagagtcatgacctgtctgaagttaaaacttcaaagagagttgtgggctgatgtcaatatcacttcattgatgctgatcaaagtctccttgaagctgaaagacaagatgcgttaaataattccaccttcatgaactaaagcagagggagagaatgagagggcgtttgtaataaaatgttttaaacgacaggtgtgttaaaacagcttggtgtggcctcagatagggattgtgtactgatcttgctcttctttgtgtggaatgcacatgtgcctcagtagtgctatggcgcaaggcagaagcactcagaagttgcattatctatatctttcatggatcagtaaagctggcatttctcctgcctcttgctgacatacacactgttcaggacctcattcgctcccacatcctcctcttcccctctcccagctctctttgagaaaccactgttgggagatggctctgagtgagaactgcccacccaacccagcacaggccccctctgtccatctgcccagcccaccttagccacagtgagcattcatcctttgcacatctaatgcacacagccaatcccaggcatcttccttccccttgtatgagtctgacaactgacccggtgatactctactctgccatggaaaaaaaatggcaggggagaatgagaacacctagtgggctggaatgtgcccggcttttctgttccgtctacagcagatacaggcagtgtccccgtagccctggggaggccaccttgagtgcctcactacttcttacatcctcactttccccttggtgcccgggcatcacctctgtatattctctctcccctaggagggtgcaggagagtagaggagtccagcccttccaggccatgccccagcagagtcaacatgcctcacctttggatagtgttctagtgtctgtgaggcacaaggcctgctcaccccagaggccaaggctgcctaccctgggaaagtagacatgccgcaggtcaaggactgtctcaagaccagttaggacagcttctcagcatcatctcaagctcaagccctggaaatctcaggctttgcaatagcaaaacacaaatctgttaacttactcctcccaagacaattactgggaaaaaatattttgtaaatattcaaaggcttctgtgaacagcctgaggccagatgaccctgaaggcggaaggcagcaagccagacaggagccaggagccttgcctgtgtgcacgccctctctgggtgtctgtagagccataagcctgggtgggtgtcctgatgccaccaccagggcaaagctctcagtaagaggacacagccaagaggaggagcaagccttccaaatcagtttgtctcctatgtttaattaaaaatggcctggtccaggatctgcctgcagccaacagatacctcacagttgctggtggttaatgtcgcgagccttctggtctttgccacctacagatgctgggcctgtgggtttcctttctctgctcttgtttcctgccacctgccacagggggctgcccaggccacatgtccatggtcactacctataccttccagttacctgttgccaggactggccagggctgcttggtggagcacaggaagagaggggatcgcctgcagaacctgtcctcttgaagagcctcaaggaagtgaggcctttgcagaaactgcttgttccaaagcaaagggcactctctgtttcctctgggttgctctctatttcctcctggtaccagctctctttttatactgcttttattgtgaaatataaaacaaacacataagagtgcataactaaataggtacaacttaatgaatgattatcaagcaaacacaacccagtcaagaaatgaaatgcacccagcattgcaggagaccactccgccctcacacactcatacccatctgtacagctggcctcctgggaggcaccacctcctgaactcttgtgttcatcacgcccttgctttttttgttatttttcatttgtttgtttttttagttttaccacctaggtgtacatcactagataaaacaggtggcttttgtctgtttggggactttgtgtatatggtagcatggagtgagttttatgtttgtgagactcatctgtgctttgtatagctaccatttgctcattttattgctttagaatacagtattgtgtgaattcctacaatttacttgctctgtggtcacttacgttgtgtgcagtttttgataagcacagatgaagctgctataagtagccttggggtgcatagtgcacacatttcatacacctaggggtggaattgctcattcacgaggtctgtgaatgaataagttcagtttcaggagactgttccaaattgttttccaaagtgggtgagcccatttatgctcccacaagcaacgtaggaggggccttgctgctccccactctcagtagcacttagaatgatctttctaacttccaccagtctgaagagcgtggaatggtacttccctggggtcttcattcatgtttgccagatgcctaatgaggttgatggcatcatctctcagggaaacctgtgcttgtctgtctcagtttttaacaagaaaatgtcaatcaagacatagggtaagatggagtacagcagattggacatggattcagaaaccagagttcagatcccatttattactactatctttttttctggagagatggcgtctcactctgttgcccaggctggagtgccatggtgcagtcttggctcactgcagctttcacctcctgggctcaagtaatcctcctgccttggcctcccaaagtgctaggattacagatgtgtgccactgcacctggttcagatcccatgtattatctccatgaccttgaggtcacagacgtaaaagattaaattataggaaatactttggagtgacatattgtcaccattctttcaaggccaacttttataggcatatgcatccactcttactgctgtagtatttggatagctctctataccctcaaactataagccactgatatgtatagaataaacataaatagtctcactttataagatactttccctataaaacagactcagttctctctttatatgaaaagattaccatgtggttttttgttgtgttgtgttgtgttgtatttaacagtcaccaactgctggctgtagtcggccatgtggctgtgaaaagggagctcacaccttgggcgctggcaactcggttggtttgggaagaagaggttgttctcacagtggggaggtttcagcacagccacctgctgaggccacagagaacctagatatgtgtcctgtaccctggccagctgccctgagctgtggggtgctgtgcatggccaagcaccgctagaaaagacacttattctgaatttcactcctcccatgccatcgttcagctttcaagtcttgggttagctttttgagataagtctccatggcaagggacaggaaagcatggccatgtccagttctgaaggccatctcaactctccctgtggtcgtgtatctgacttcttgcaaccaggaggaggcatcagaaatttccccagtacccagacgtcccaaggcagttgggcacacttgaactctgccccaagtacagtgcatttgggcacgtggcttaacaattttggacctcagcttcctcattttagaaaatgcaggggccaaagaggcttcctgggacttcatgactcaccctcagaacctaagatctcatgaaccaaagggctgcagctgtggagaggggagaatggggcagtgtgtgtgactacgaagctaaactgggggattcgcacccatttcgtgccttttcagcctccactgggacctcgaactccccaagtcccacaggtcttccaggggatctctcacctccccatgagtcataagccttacgtggcatgcactgcagtgggggtgttgttccctgcctggcatcagactcctgtgtttctgttcaccaggacccagggcagggggttgttctgagggtcgcccagcattaccatgaagacagagccttggctgctcagcacggccagcacagctctggtttcacctctgtctcttcaccccacagtggatgtcattttcttctcctgggggtgttacccgacaatatcatcatttgaaactgtttgaagtccagccctgcctccctttcctgcattgggagcttggaagtccagccctgcctccctttcctgcagtgggagagtggaagtccagccctgcctccctttcctgcagtgggagagtggaagtccagccctgcctccctttcctgcagtgggagcatgggagggactgaggaaggcccgggggatggaggcttccataaccctccatctctggtccagaagatggctggttaaaatgcccaccaaacacccccacccacactccaagctaggtggtagagctgtccatcttggatctaacccaaatgcaggccctggtgaagaaaggtgagtccacagtgctccacagataatcagggcccgtggtgcccctgtgctcatcaccctgagaagcgtcactgctactgagcaccaggctctcctgaccactgcccagagctcctgggccctgctagagcttagccatggtccattcatcaccaacctgctagcatttccttgttgcaagcttgcccactggcatcatccctgagtggtaaactgggccttcctgggttgggtaaagcccttgaccctgaggctccaaactctgccctccagctgccttgccaggtgacaggccccagagagcggctgctgaccattcaggccagggtgcttcctcccagggtcccacctggagactggcgggcctggggatgatgcagttccatcctctcttctaggatccgagccagagacaacaacggctcctacgccctgtgcctgctgcacgaagggaaggtgctgcactatcgcatcgacaaagacaagacagggaagctctccatccccgagggaaagaagttcgacacgctctggcaggtacccagcctcctctccccaccttgtgggtagagtacagggcacgtggggctccttgtcccatggactcttagacatgagaggaactggaccacccactgcccacagtgtggtccccaggccagcagtagctctggagctcatgagaaacacacacctggaccacacctgggctcctgccccacctgcccatcagaccccactttcagcctccaggtggcttctgtgtttgagaagcactggtccagaggccgtcatgtgaggtgaacgaaggttccatggcttgttcagggccactcagccctcagtgccacaaggtgatgtaagtgcagggctgtgttcagagtttaacaagacactctctttggagatctagaaaatatttcttcctaggatattctaactagagcccagaacagcctttcagacaaagacacacaaaataaaggaatggatgcctggggaaggaggcctaggaacagccaagcaggactttgttggtggtgtgagaggctgaattagacagcaaatgtcaggtgccctcctcattgtaaatcgagtctctctctgtggaaactaaggcaatttaggaagcatactccctgggctccaggctgctgcttatgctgattgccacagccctggtctaaaaagtgcttattcctgacccagctactagaaaaccctgaaacaactcccaatttggaagttccttaggcactaatgagcactaaaataatgctcatcactgctttccctgaatcgcagtgagcacagattgcttgtcttaattttgcatcacagctacactggctgatgatgaaggaaataaccgtaacagtacttcgtgcatcatcttcgcagagcatcctataaactgtagtaggttcagaaacagggagaaagccaaccgactctgccaccaccccaccgccccagagcaccagctaccttgaacatgtgtgggtgaggggcataatcagggcgtgttccaatgtcctcacccaagcccagctggggccacacatgcagtcaatgttgaggaaaggactcaactcaaaatcctgtcttttcaaaaactgagactacagagccttagcccctttaaagcacttaaacttactacttccaaatgtgatttgctttctagtgctgtaattggaaaaaaaaaatactccttttttgaatgctggatatgatcatattaaaaaatgttagtcacaacatttacattgtcttttgattttgtggctcattgccatttgtcatcattaaccacaggcttctttcttttaacgatattgattcgaaagagtatttaacctttctacactcaaagccccaaagcacatcagggaggtgagtagggaatgtggccttctggaatgcaaaggcacctggagtcctctatgccagcttaatgctccaaggtcccaggccccatcacttataaacagccattcattcaccttctcctgaaagggcattttatgtgtgtggcgttctgtcaccatttcaaaggctgagcactcaccatagtgttaagcatctctaattattgagaatgtccttcccaagaatctttactatttgtattgattcccctggtagatcatagcattcatccctaattaaatattcctcattgtatattttctaggcactgtgtttaggaaactacgtcaaaaatgccagcaatacgttccaatttcccatgcatgatttcattgatttttcttgacagcgttctaaggtacttctgtaccctacccaactccagggccccagtgctatttcacggagagttggtgattgccataataccctatttcaatattctttactgtagaccagggatctgcaaacccacagaccaactctggctctcagcctgtttctgtgtagtccctgaagagaatggtttgtatgctgttaaaggtgttgttttggataaataaataaataaacaaaggacacagatacggtatgaggcccacaaaagcctaaaataccactttctggccctttacagaaaaaatttgctgcccctagcccaagaggggggatccctagctgtgggcccacttccccagccacccttgtggagtggacttaagcacataaaagcatttatgtgtcttggggccacttcgaaagcccaacagtcagtcagtagctctcagtcactatttgtctatttcctgaccttggtatttaccactttcttacttttttctctttcagctagtcgagcattattcttataaagcagatggtttgttaagagttcttactgtcccatgtcaaaaaatcggcacacagggtgagttcccaagacactggagtctcagtgtttgaggtatcagtgacaatcagcctcattttagacttagctgattgcagatttgggttggatgaggacttctttttacgggttgattaataatgatatcagagcactccgattttgtatatcgtgaatcaaaaaatagccagttgctttaactttaaaaaaattgtaatttatttgtcttcattgcatgcgggaaaaagtaaaagagggtcgaaagaagtacctgcagaaagcgtgctcacttctcaagcagcagcacatcctgatctcattgattgatctgcagtggggaggggaaggaagtggtttcctcagatagagcagtaattgtccatgctctctctaaccaggaaatgttaattttggaggccgtccacaacttccaggttcccatcctgcggtaagtgtcactaggaataccactgaatgagaagctgttgcatatttcacaaatgaaaagcatgttttagctaacaggagtagtaggcattgatattttgattgcgcttcaaaacatactccgtgatgagctgggattgctagtgagtgttaggcagaatcagcctcctattagtgataaactaaccacattttcttttctttttttcttttgctttttttttttggagatggagtgtctcactctgtcaccctgactggagtgcactggtgcaatcacggctcactgcaacctctgcctcccagcttcaagccattctcatgcctcagcctcccgagtagctgggattacaggtgcctgccatcacacccggctaatttttgtattttttagtagagacgaggttttgccattttggtcaggctggtctcaaattcctggcctcaagttatcctcctgcttcgacctcccaaagtgcttggattacaggcatgagccaccacactctgcctagccacattttcttaacttcttgtctagatgaaattctcttcatttttggagaatatacacaatgcgaatgaaacccaatattaaatcagaagtaggcctcttgcaatatttgagaaatgggaacatattttttaacttcatccttgagccgtctatgttaacacacgtaattcacaggacctcagctgtctcctccctccagcctgttaggaagtcaggtacagatttatgctctaagcaggaattattttcctgctcttttcttggggctacatatggcctttttttttttttttttttttttttgagacggagtctcgctctgttgcccaggctggagtgcagtggcgcgatctcagctcactgcaagctctgcctcccgggttcacgccattctcctgcctcagcctcgcgagtagctgggactacaggcgcccgccacaacacccggctaatttttttatatttttagtagagatggggtttcaccccgttagccaggatggtctcgatctcctaacctcgtgatctgcccgcctcggcctcccaaagtgctgggattacaggcgtgagccaccgtgcccggcccatatggactttttatgccctttaatgccatctgtgaagtgcgccctctgcacctcactttttgcctggtaacccttgaaaaacaaaatctgcagaaagccaaatatacatcctgcctccagtagggacaattggctgcccagtagctgagcccaggttgaaacaggggaggctgtccaggggcagcacttgttatcaaatgcagggaacgtgaatttgctaaaataccagtgacctttgggatcaaaatgtaatgcctttatggaagtgtgactttattttgccctttacagggctcacaggcctggcaactctatcttaatattataggctcggtgagacagatccatacacccttcagatggatgagggcttagggctgagaactcttaaaagaatgtcaagccctgtgcttagccatcatcacccaatgactacaagaagttagatattttggaataactttttaattgactggtaagatacatacgggaaaaaaaaggcatacgccctatgtgtacaactcaattaatttccacaaaattttccaccgtggaaccagcacccaccatgaagaagcaacacaactgagcactcagatctacttgtagtttctttcggtggtttgtcttgagcttacaacttaataattccacgtgaagcatgagctagtgaatgtaacagctctaattttgtagccttcagtggaacatatttcccaaatatatttctagatccttcttcccaagtggcaggcccttccagaagccttcccaatgatcaggtgttgcccgtggtcgatctcattggcagggacaggagggggttagtggtgcgattatagaagcaaatttaagtagcatgtcgtggaagggatcctgtatttgttttctgaaacatttactgttcctctttgccgttgtggtttctagacttggtcagcgggtggaataatctcaagaatcaaatcatactccttcccaaagcctggccacagaaaggtgctaaagcaacccctgcttgctgtccaactaagtggtaggaccaacgcgcactcagctcccgcccgcccagtctgccctgtgtgtgcgctgccccccatctcttgccactctgcttccaggcctctttgcccttgctcacacctgctgttcctgggcagccgcgccccaggtacatcatgtgcttttcatgtgggtcctcagtccgtcagctggaagtccaacagtgtgagcatgctttctgtgctcaagcgtcattttaaagtcgtttcagttggcgtcatccgtcatagctaattatcatgtccgaaaatcttttcaaagatggcccacttactttttggtggccagactcacgtgttgcagtgttctggtaattgattatgtaagttacgttgtgatggagggaacaccaaggttttgtgaggcgcgctgcacagtgaggtcaggcagtgcatggtaacttcattatggcttagacgtctaacatagaactgcaaatgtgacatgtaaagaagaggtgtaatctgaggtctagaaaaaccagttttctttttgaggcagtaatgttgacatctcattgatttccatgttttgttctattattggattttgagggaaaataaaaataagttctttttcatgacttttatttataatgacttatttattccttcccccaaaatatgtatatataatgtgtttgaattgctttttttccattctacttttattatcagtggggtaaaattggttcttttatcagtaattctttttattttcatattacttggtgtttttaccgacattttagcatataattgagcatccactcatgaaatagattgcctaaagtatttactagaaacaacagaaataaaagacataaaacccttgagattttatttagtaataattttccaagtttactcatactcaagaagttctcaatcgtgttgaccacagaacagaaagatttaatgcagtgttcgagaggaagaaaaggtttattttacacttgaataaagtaactatgtctgtttttcatgtttacccaaggcaaaacacccccacagattactcacagtggctaaagaaatacctagaaaataagttttggtgcatctttagactacaggagaacatgtcagaaaaaagttgaagaaaatatcagtgaccacctaaaaataaagaagtatatgtgtagataacaaccataacatcatcaaaagagaaatgagaaactgggagtaagtagcactaatgctgacacatagattaatagctttaatatacaaagagattctaaaaataattaacaaaaatattaactgtctactaggataattggcagggaatatcagtagtagtttatagtaaagcaaatataaatagttcttaaacatatgaaatgttgtttaacttcatgagaagagaaatgcaagttaaaactatggtgcttaactgtgtccacctatgatccaaattttaaaagcttgataacactgtagtaaaggcatggtagataagcactttcactcttccttggggaagtctgaaatgatgcaatctgtaagaaaggctctgcaattttatttctaagtatgtacagatattcttgcatttgtgtgaaatcatgtacatgtgaaggtgttttttccaaaattgtataattgacaaagtctgataataatttaaatgcctatcaatggaaaacaaatgaaattggttacagtaaaattgctactatgggaggcagctgagatctagaattgttttcaaaatataattttaagtgtaaaagtcaatgtcctgcaacacacacatacacatacatatatgcagaatgtgttgatatcgtatacagtatcctagaaaaatacagaaaatgctggcaatgctggttgcctctggagtaagagatgggaatgttaagaaatcccacttttcattgtaaactctgttgtatctttttaaatttgaacctgttaagaaattttaatcaatttttttaaaacagaaaattaaatagtagagagtaattaatctgattaatattgtgaaaatacctttctggcaaaaaaaaaagtttgctttctatttaagtttagaagaactttaaagtatacattgaattttttatagaaataagaaactggaaataaatattactaatgatgacacatatataaggccaaaaatatcaacagataatttttaaaagatcaaggttgtaaggtttaagctatagattaaaaatattttaattgcttatcagaaatattttagagctaatatgtatattttcacaaacaaatggggaactttccattatgtaatcagtcatgagaaaagaattgtgagaattatgtcaaatgtcccatcatgttagctaagagataaataactttcttgaacttgttaatttgctcagtgtacatagttgttttaataattcaggcacaaaaaatacatgttagaacttgaactacctatagcatctagatagttaatgaaaagtatgtttagatttgaagatgattatgaatcagataatttaaatttttcataaaattactaacaggctgatgcattttaaacttgtctttagaaattagtagcttactgccaagcacagtggctcatgcctataatcccagcactttgggaggccgaggcaggtggatcacttgaggtcaggagttcaagactagcctggccaatatggtgaaaactcatctctattaaaaatacaaaaattagccaggcgtggtggcacacgcctataatcccagctactcaggaggctgaagcaggaaaatcacttaagcctgggaggtggagattgcagagatcgtgccattgccctccagcctgggagacagagcaagactctgtctcaaaaacaaaaaaagaaaagaaaagaaaagaaattagtaacatacttataaagtataaacaaaattaacttaagaatacaactagtagtctttaaatgaattaaacccctcccaatattagtcctggaatttctttctctgctgctttaagcacagaaccttatccttcttttatggaaaataggtggaaattaaacagcaacatctctaaaaagacttccagggaacttttcagctttgcatttcaaaggcacatcccctaagaggattaaactgaaatgtgtcccagaatttccaattaaaacccatttttcatgttttattccaacacatacattggtgattataatattttaaaacttacatttaagtacagggctcagtgggaagagaaaaaagaaagaaacatcctcaagttgtaccctgttgcttggtaatgccttagtagaccagacccttgagaaaatgtgttttcatataattataaaggaacagattttagatcttcactgtaagagaacagtaattgcagaggtcaagtgttattttcatggatctcagagcaaagctaatagtagcctattccccagccaacagtctgccctcgcctgtgggggtctactgaaccagggtaattccaccaaaaaaaggaaaccaaacctagtttattgcagccaatatttctaaagccagctggctcttttgtcactattattgtgatgactaatgactgtattgtcatctgcattactgctgttgcctaatttgaaaatggcccaagaatctgggagtaaaaattaagatctagtaaatggatgttaggacacttggcaatactctggaatcaggaaactctgaatggacctatcagttccacagaccaataattttttcctcttttgttcacttttggatcaccagcttttaaacataggcactcaaagaatgcttgtcaaatacattttctattcgcagttaaaccttaccaataggaaatcagggataataatttataactggacttattattgcagagtgatatccttacctgaatttataaaatttaaagaaaagtcaccagttgttcttttggaaggtagaaagcgaaggtggctaatgccatctagcggtggactgaaggtttgagcctgttctgagtattagcaaaaatgaagaaagtggaatggtcaacatttcatttacaccttgttgctcactgtgcagaacagatgacacttattgattgggacagaatggctctctcaaatgcaaacataaagaataaaaggttaatagtaatgtagaccggaaatatattttttattaaaattaaatgtcattacattttttaagaatagtatttttacaatttatcattatgccactgtgctcattctttacaaactcctcaaatttttctttttaactgagcattttcttttagagattgttttggttattgttctactaagtggcatattcaccaagtgctttgggaaagatgaagcatggattttgcatcttcatctttatcataaagtaactactgttcttttaactgactcaataggaaacctcccatttcttccacattcttccagttgtggcatcattctttgctccagtcctgttagtcaccagaaagagataggggcagggagcccagggatctgggtaggagagagttgatgtggggttgttgagagacatgagggttctttgtggcttggcttaaaaggcttataatcacatagtggtctgtgttgggcagcatggaaatgaagccccaagctttattggctataaacgtggagttctaatttccgaggaagatctcccatctgtttccctatccataagccaagatagactaggggtgaacaacacactgctagtgagagtataaattatttgtgcccaggggtttagattctctgtgtccatcgctactaattcttactcattcctgacaccctagtatccctttcagcatattttgacaaccccatctctgttttaaaattcttccctgcaggattcatatgtcagggaattgcgttctggtttaattggaacaagccatttggaagtcctcctggtctggagaacattctgtgaggtagagaggctgcaaccccaggataatgtcctcagtgggagggacaggaggtcttatgtcaagaagaggtgatggtccctctcctcaccagtgatggctagtccgaggacatcctttaattccacatctgttcaagttttgtctttggatctcagaatgtgcctgcctgcagggaaaatcaaaggagttgaaatgacagtaaatattaaccttgaaagagactttaaaaaaaataaaactattttcagcctagaattggttgcgggagaaaactgggcaaaagaggaggacagaaagcctaggggatcacccagtttctgtcaggacagttttccagaggcaggataattatattataaatcagaagtgaaaccacagcacagtcctgtaatcatatgtaaatgtttaaaagaaatagattgtcatttggaattattcattcttatttctcttcatcagcataaaggcttgagagagagctaatttttaaagcacattagattatacttcacatctcctagtttttagaagtgattttcattcattcacccatccattcattcatgtgtttgttcaacacatttttattgagcgtccttgtggacgtggcacagttccgagtgcagtgaataaatgtctccccctccttgagcttatattctatttttatttttgatgtgtcatagttacttctgttaatcagttcagtagaagtgctgagatactctgtgacaaaacagatcccatcgacatcatttttacaaataagaccagatgtcctttagccttgtcaacaggcttgggccatggtgaacaatgtctgcctctgaagtgctcagcagaccgtgtgaaagaagaaggtccgggtgtttggaaacaatggctgagtggcggtagtggtgcattgtgacctcattattctgcttttggtttctcgccttgtaatatgaataaggcacatgaggatttagtgtgtgtcataagataagtgactgtcacgttaagcttaatgtctctgtttctgtaactttctccataatctggcagtatctcatttcttcgtggccagtgtttgggcactgaaaaggtcaatcaatacatagaattgtgactcaactcacgctgaaaaaaaaaaaaaagcatctgaatcatggttctcctgtgaattaaatttagtagcaagaatcttgttttaatttggaagaaagggtgggtcaggaaaactcaagatagagactttcaaaagggaaagtccttaggataatgagtagatttccccccccagttgtttcatgatataaactgatgtggaccaaataaatacctgtctcacaggggtactgatttccagcattagctgtggcagctggagcattgctggcctaggtggcagcaactggccttcccttgggacctgtagttactgaccagtgccaccctctgccatccaccccaatgctgctgcatctccaccgaagataaagacttgggtggagacttggaaaacatatgtgcgttggagttgggaagtaggtaggagcagctgatgagtactaattttcctctttaaataatgtccatgtaatatgaaattgaagagcacaagttaaagaaggaaaatgcttccaaggcgaacatgcaaatcatcagcgatctttggtaggtgggaataggatgtgcaagggggtgagtggggaagcagctctatccaggccagtagagttgactctcaccacaccctctgaacacctcacagagtcccttgagttgtagcagcacaagcttgctttagcccttgcaagatccaaataattgcccgaagaatgagatcagccttattttcttccctgtttttcgtaattctttcctttgtctttcctgcaaaagttaaactgtgattattggaaaataaaaataattatgcagatcaacttaacagttttgtggatgaagaaaaacaacctgttgtcctttatgtactttagtcctcccctgcccaagggaaccggcaagagagtactgtgtcattcaatccgtatgagccagaacttgcaccctgggctgcagacaaaggtgagacttcctttcattcaagggacattcacagagcaaagtgcgtggtcacttgtaagtttgtagagttggttcacgaatccacaccacgtccgtgattgcaatacagccacagttagccatggaaacactcacatctagtggcaggcagcaggcaccacatgcccatgagcagtgatggtgctattgaatgaaatggtctttcccacctccctcacccaacgacgttggaaatgtccctgccactcttcagaatttctcatcccttgcaacattgatgctactctgagttcatattcccatgaagatcatgttcttggaaggatgaatcctggtgtggggtccagccccaggtcgtatgtttcttgactgcattgcaggcccccagagagaagccctacccatggacacagaggtgtacgagagcccctacgcggaccccgaggagatcaggcccaaggaggtttacctggaccgaaagctgctgacgctggaagacaaagaactgggctctggtaattttggaactgtgaaaaagggctactaccaaatgaaaaagtaagttgctatgttccaccagcctcaccctcacatgagctcaggttctagacatgactgagaataacaaaatgtaacctggcatgactaaaccctttttttattaatgctaccattcttgttaatttctggtactattataatgaaagcgtccattacctttaatggcaaaaactgcaattacttttgcaccaacctaatagtacatgcaccttatggaaaattaggaaatagaaacaagcagaaacataagaaaataaaaacatcaaattggcatggtggctcatgcctgtaatcttagcaatttgggaggctgggataggaggattgtttgaggcctggagcttgagaccagcctgggcaacatagcaagaccctgtctctacaaaaaaaataaataaataaataaataaataaaacataaaaaattagccagacatagtagtgcacacatatacttccagctgctcaagaggccaagaagccaaggctgcagtgagccatgattgcaccactgcactctagcctgggtaacaaagcaaggccctgtttcaaaaaacaaaacaaaaaaaagaaaagaagaacatcatatttgtataataccatcccaacactactactgttaactaaacattactactgttaacttaatcttattgtatatatttttagatctttatttgtacacacagatattatttaattaaaacaaaatcattccattataacaatagtttttacatttattttctttaattttatagttacatctcatttttcttacatgaaaattattgattccaaatatgattagtataattatttattggctttatcctatgatttcagataacaatacatattatacaacagttaaaattgctaaatttcgaaaatatctttgtatttcttttggtctttagaaggtacccaacatagaatgtacaagtaaaactactggtttctaaagtcctttgaaatacaccctctgtttgaattggtatgatactaatatgaatgtggttagatttagtagcttcatggtatttcaaatgtaagggatttttgtaaaaaaaaaattcgtgagtaggtaatttttatgattcaagggttaaaaatatagacaaaaatatacacagacatgcgtgctttccggccgggtgccgtggctcatgcctataatcccagcactttgggaggccaaggtaggtggatcacctgaggtctggagttcaagaccatcctggccaacatggtaaaacctcgtctccactaaaaatacaaaaaattagctgggtgtggtggcatacacctgtagtcccaactacttaggaggctgaggcaggagaatcacttgaacctgggaggaagaggttgcagccagccaagatcacaccattgcactccagcctgggcaacaagagtgaaactctgcctcaaaaaaaaaaaaaaaaaaagaaagaaagaaaaaagaaatgcttgctttccaatctgtcccttcgatttgtttttgtgcatgtgtgtgtgtgtaaattagatacacatacatgtatgtatacacacacaaacatacacacatatgtatacattcacaagtatatacatgcgcacatatatacacacacaatcaaaattggctgtgatacttattttaaaatatatgtttgtatatcacagtcattttgtacaatgagtaaaaatgtttctgtattaatcctaagctttttcagattatgaaaggttgtgatctttattctgtgcttaaatttgtgaattaacatagacatgactgtggacataatttcaactagagaatttggggagaggagaggctctctcggtcaatttggggcaaaatgatgtctttacaatactgagtctttcaatctataaacacagcccatctctccatttaccaggtcttcttcagcctctctcaggagagttgtttaccttttcaatgtattacattgaaatatatgcttttaaattctgcacctagaaattcactttcaacaattatgaaaggcattttatattcacattcattacatgtaatctgagatggtgaatcccaagatgttacaggaattcgtacatgtcatcgttggtgaagtttatttacaagttatttaaatattttacagtttagggtttttgcttggttgggacattcttcagtactgttcttcaccattctttttattttatattattttttagaaacagtgtttcactgtgtcacccaggctggagtgaagtggcaagaagctcactgcagccttgaactcctgagtccaagtgattctcccacctcagcctcccgagcagctgggactacaggcttgcactgtcacacctgggtgattttttttagagatgggggtctcactatgttgcccaggctgaccttgaacttctgacctcaagcaatcctcccctttcaacctcccaaagtatggggattgtcagcatgagccaccatgcccagcccccaccattcttttttagtaatggagtattactctcattgtctataaaataagggaatataggttggaaggccagccatccattacaggcttctgaagacacattgccactctgtggcaggtatttccgtgggactgtttccacagggggattatgcttcacaggataagattatctagaagtgaggcattttggaaagtttcttgtgtgttatgatttctcttgcagagttgtgaaaaccgtggctgtgaaaatactgaaaaacgaggccaatgaccccgctcttaaagatgagttattagcagaagcaaatgtcatgcagcagctggacaacccgtacatcgtgcggatgatcgggatatgcgaggccgagtcctggatgctggttatggagatggcagaacttggtcccctcaataagtatttgcagcagaacaggtattgtcaggtgcccccacacatctggaagctatcccctaagggacagggcccacccctggatgggccgagcagcctgatttccttgggaagccttcccaccctcctgtgccttcctttattggtccatactcagggaccttgacagagggacagggagacatagtctttggattcagctctgttagctctagttgttcagagaagaactcatttgacagttttgtcttttttttcttcctgtagtcattcagtcttggcctagtgatagactcagcctcagaatatcttgacatggaatctcctttctcactgggaagaacactttctttttaaagaaacattttaaataaatgcttttctaagaggtgacagttaagtcttatctgtttggctgaccttatgttctcatgagtgatgacttctgaaaataccaatcactgctaattgattacatccatcaagggagtaattgtgttcttctcatctaaagctgttgttgagatgaagaaactcacttggagtaagacagaatgatggccaccgaggagcttgcctcatttgctgtgctacgtttgtacttagattgtctctttagtctccatggaagggaggtgttcttaccctgactttgtaggtgagaaactgattctcagggttagttctgtgacctgtgtgatactggaacaaggatttgaggtggtgcctggctatctgtgagccaggcctgactactctgttatactgcttttcttgcaattccaagcatgccaggaaactcaatcccattgaacaccaggagaatatggcattgagtcctgaagagctatatgctaacaaagttatttgtcaccactcgtgagttttgttgtttaagaagagggaaggagtagattcacccactgcctgcgtgaggagcatggttgtttgttgtgaaatgggtcactgtctgttatagctgatgagatcattatgactttcagacatgtcaaggataagaacatcatagaactggttcatcaggtttccatgggcatgaagtacttggaggagagcaattttgtgcacagagatctggctgcaagaaatgtgttgctagttacccaacattacgccaagatcagtgatttcggactttccaaagcactgcgtgctgatgaaaactactacaaggtaagtacaacttagctaatattcagagcagcaggtggtaaaaaatgcaagataaatgtacgttttctttattttattattggtatggtttcaaaaagcagttttgctactgaaaaataactatgtaagatatgttcttataatctttgattttactgtttaaaaaataaaaataatatcacaccttgagatttactcaaagtagtatattctaaattatgtttcatggaatgatcaggaatcgaggtattaagtgaagatttgttttgaaaaaagaagaatgggattccttcattaagttaatttgaaaagtttgcattggacagcttgattcttgcaggatttccccgaagcccttttcatgctacttaacattacgaatctcagtagagggtttactgcactgcatttctcaaaccagattcatccatggcatccttttctgataggacatttcataacatgtggtggaacactgtcccacagcatggagctattggagcttggagctccagtactgcagttcagagctccaatattgcagcttggagctattccaaaataactttctaatgaacacctacctatacatgcaaaagttagaaagtgaagatttaccaaataaactcgtcatctgtgtatgtccactacatatgtagaaattgttctattggcttaactggtatccagaagagttgaagtgtcaaaaaatagatgcagtgctggaaagaagagatctagatagttatgtgactgaagctaaaagaaatatgccccttggtttggtgaggcagagattatcaagaattaagggtggacttccagcaaaacataaagtagaaactagttctgggtgcaggtttggacttcctaaaaaataatttcacagtgaccaatccccttgctaatataacttgacccctctctgaaccctcaaatgaaccaataacaactaaaagaagaaaagataagaaagctctatcttcatattaactcatctgtggtgtatacctagggtctatgttaaccaactggaaaacgtgatggcaccaatcccactgagtcaaagagggtgccgaaggcaggttaacaaccctgctagtctctggtgaagtccacatgctcagaaatagatggcagaccttcaaaatctacctagtgggtggcagataggatcctgtgtttcatgccctgcagtggtcagagaccccaccctgagtgacaatacccacccactcacctttccctaagaggcagtccatggactggtaggtgatggggaatggtggacctcggccagcaaagggactgcatgaagggtaagccacaagagccaagctcccaggcaggcaggcagactccaccatcttgagcacaaaggccaggcgagagtacagcaggggtcaggctggccctcctcaccccattcttcatacagtagcttcccagaaggaagccccttcagaggtgaaccactgtgagaaaggcatcagcatgggcctggatagaaatagcagggaaacagagcaaggaagacagcagcctaggatgaccagcatgggacatgctggagaaagaagcctgttgtaatgctggatgtacctcatcatgatcattacagaaaagaagacagcctgtctgaaacaaggacacagaggagatagagaaaatgaaacatgaatgctgggcaccttatccactgctgtataacaaatcaccccaaacttactgccaaaaacaccaccaggtgttggtttccctgccgtcctgctgtgtgggcagggccaggtaggcagggttcagtgcgtctgctcacacaggggattgcacagtggcccgagggacaggaggaccgtttccactctgctcactcacactactcagccactgagcagctggttagacacagcccatgctggagacctctgcggggctgtcagccagctcacctgcacatggcctctccttggggcccttgggcttcccttgggcccatgcttcccttgggcagcatggcagctgcgggctgagagcagttacccaagaggcaggaagtgggggctgccaggcctataaaaccaggcccagaaactacctcagggtcacttccacctgatcctattggtcagagcagccaaggccaccagcttcaaaggatgggatagatagaaccacccttttgaggagaagtgtcaaagagtcaaagaacatggggccaattctaaaactgctgtagatattaaacagcataccattaaaaagtaaactaaactaaaaagtaaaccaaagattgtctttggacaatcaatgaagaaaaaaagccactagggaaataaaagccatcttggaagcagcaaaaagagacaaaactaccgaaaagatagggtagtggaagatttctgtatgaaaacaaagcaaagtgaaatggaaaagaataaaaagtgggccgggcgtggtggctcacgcctgtaatcccagcactttgggaggctgaggtgggtggattacctgaggtcaggagttcgagaccagcctggccaacatggtgaaatcccgtctctactaaaaacacaaaaattagccaggcatggtggcaggcacctgtaatcccagctactctggtggctgaggcaggagaattgcttgagcccgggaggtggaggttgcagtgagctgagatcgtgccactgcactctagcctggccaacagagcaagactctgtctcaaaaaaaaaaaggaataaaaagtgaaacaagatcaaagaaaagtgctagctgtggaagcaaacgaacgctggcactcgggaaaccatgcgtgacagggtagatttgtgcagcatcacaactgaaaaacacaggtgttctttgatccagcagctccttccgagagcaaacacacacatctggtaatgtgcactctagcacgggctgccacggcaaaaatctggaaactgcctgacgactgctccgcagggtttggtccaatcagtcatagcagattcacaggaagctcacaatgcaacccttttaaaagtgacttatttgcatgtgctgacctagaaatatgtctactatacatggttaggtagaaaaattaaaaagtacagtgctcaaagaatatgcccctagttttatgaccagaaaaaagtatacactacctatttatgcatgtatctaggttattctgaagacagcctaaatttcattgcatttaagatttgtcaaaggtttacttttttcatcagttcaaaattcagaagaaacctgaaataacacacatggttgtattgttcatgacttgtaagatcaaaattttaaaatagcacacaaggtgatggaaacagaagtataatcagttgtatcatttggaagagaagtgccagggcaccttatggtctccagattgatgtcctgaatgtctccttgtgatccactgtagtgtcatgaaatcagttttcactgaaatcatgtccccctctccaccccaatgagacctcacacaggtgacatcagcagaagataaccagactccgctgtgtgccccctgaatcccaaacccagagagagggttttgctatgcagttttgacctctgtactatcacttgctttttaaaattaggaaattagaatgcttagatcattttttaatgatgctagcaagtagtgcatgctaaaataattgacctgggtggagaactgatcaagatggacgactaaatgcaactagtatatgctcctccgtagagacggaccaaaataacaagtacatattcacacttccaatagatggtctaagagagaacacagatgcaaccaaggagcgacaggaagcaccaaaagcaaagcacagggaaacaaggcagcctgcttggccaggaatgactgggagctgggagaagcttccagatatggggaaagcataaatgagagatccccagggctccacattccagccaaggacttctacaatcctagcgacagaagaacccctcgacccacgtgggccttaagactaacatagggagctgcctagggatcacacagaggcattgctccatagagggaactcacgctgagtcccacaggcttccaagctctgagtagctgcagcttggtgccatactgagaaccaagtccccaaaggactgcatcttgccctgggactattgctgatgctgccatcaccaggccaaggacagaggggagaatggacaccttcacacaccccagggacagatccccctgctgctacaggctgctgtggggctgagacacaagcaaatcacaccccctatagctgcctgcctacactgctccccctgagaatgtccgcagcctccccaggagcaggcccatagccagcgccattctgagagccaagcctccaaaggtctgtgtccttccttgggccagggctgatgctgccactgccccgccacatagggagaagggaggccaggcactttcacatgccacaaaaacaaataccaccaccactgctgagggctgctgtgggaccaaggctcaagaagactgcatatcccacagctacctgcctactctgcacctattgagagtggccctaccctttctggtggtaggccttcagggcagccactgctggcaacctagagaccacccctccctgcgtatcacagccagcagctgaatgcaccaccagggagcctgagcacaagtccattggcctagtcacatgccccaatacttgagcatgacatcctgttgcagccaccgccaacaccaacatggaccacttgggttccagtgagttgccctaccaccattactgccatcacccacatcacacccactccccaggaacccaagaacctgcccacatgcccagccactgcagcatccacacaatctacctgaaagcccaagggtcagccttcttagacctactaacaccagtgctagtgtataccgccctagggcccaaggacaggcatactcagctcactgctgtcaccactggggtctgaagactggcccacctagcatcctattcacagtacaccttcacaacagcctccactaataaccataccctaaggcactgagaaaatcacaggtgtcactgaggctgtttatggccatagaaattatacatagattaaatactgcattcaccccaaatcaaacccaaagtgccctacatatatatatgtgtgtgtgtatatatacacacatacacatacgtgtatatatacacacatacacatacgtgtatatatacacgcatatacacatacacatacgtgtatatatacacatacacatacacatacgtgtatatatacacacatatacacatacgtgtatatatacacacatatacacatacacatacgtgtatatatacacacatacacatacgtgtatacatacatacacacatacgtgtatatatgcatacatacacatatgtgtatatatacatacatatacacatatgtgtgtacatatacatacacatacacatatgtgtgtacatatacatacacacacatacacatatgtgtacatgtacatacatacacatacacatatgtgtacatgtacatacatacacatacacatatgtgtacatgtacatacatacacatacacatatgtgtacatgtacatatatacacatatacacatatgtgtacatgtacatatatacacatatacacatatgtgtacatgtacatatatacacatatacacatatgtgtacatgtacatatacacatatacacatatgtgtacatgtacatatacacatatacacatatgtgtacatgcacatatacacatgtgtacatgcacatatacacatatgtgtacatacacatatacacatatgtgtgtatatacatatacacacatatgtgtgtatatacatatatacatatatacatatatatacatatgcacatatgtgtatatatacatatatatacatatgcacatatgtgtatatatatacacacatatatgtgtatatatatatatacccaacatatatatacccaacaacatatatatattttcaggaaaaagacctcctctacaaaagcaatttcaaaaaactggaagaaatgactgttgtaccacatgggcagatatcaatgtaagaacacaggaaacatgaaaaagcaaggaaatatgatacctccaaaggaacacacaattctccagcaaaaaaatcccaatcaaaaagaaattcacaaaaccccagatgaacaattcaaaatattgattttaaagaagctaaataagatataagagaattctgaaaaacaatagagagaattcagaaaaacagttcaggatatgaatgagaaatttatcaaagaaatagatatttttaaaagaaccaaacagaaattctggaactaaagattcattgaatgcaataaaaaatacatcccaaactccaccaatagactagatcaggcaaaagaaagaatctcagaacttgaagacaggtcttttgaaacaacctattcagacaaaaataaagagaaaagaataaaaaagaatgagcaaacccttcatgatatatggggcagtgtaaagcaactgaatattcaaatcatcagtgtccccaagggtgaagagagaatgaaagattagaaatcctatttaatgaaatattagatcaaaacttcccaaatataacaacaaacctagacatccagatgcaggaggcccaaaggtccccaaacagatacaatgcaaaatcatcttctccacagcacgttataatcaaaccacttaaagtcaaagcaaaagcaaatatactaaaaagagcaaaagaaaatcttctaattacccataaaggaaccaccattagactaacagtggatttctcagcagacaccttacaggccaggagagaaggggatgacattttcaaagtgctgaaagaaaaatactgccacccaaggagaccatgtccagcaaaactattcttcataaataaaagaaaaataaagcctttcccaggtaagcaaacactgagggaattcatcaccactagactgatcctagaagaaatactcaaaggaatcttaaacgtggaagtaaaaggacaatatttaccatcataaaaacacacaaaagtataaaactcactggtaaaccaaacatacaaataatcctgttaaatagtgggctaagaacatagatagacatttctcaaaagaagatatacaaatggccaacaggtatatgaaaaaatgctcaatatcaccaaacagcagggaaatgcaaattacaaacacaatgagataccatcttaccccggctagaatggctgttattaaaaagactttttttaaaaaaatgctttgcagatgcaggaaaaaaaggaactcttatacactgtttgtgggaatgtaaattagtatagtcactacggaaaatattagagagacttctcaaaacaaaaacaggctgggcacggtggctcacacctgtaatcccagcagttttggaagcccgaggcaggcagatcacaaggtcaggagatcaagaccatcctggctaacacggtgaaaccctgtctctactaaaaatacaaaaaattggccaggcctggtgacaggtgcctgtcatcccagctacctgggaggctgaggcagaagaatggcatgaacccaggaggcggagcttgcagtgagctgaaatcacactactgcacactccagcctgggcgatagagtgagactccatctcaaaaacaaaaagaagaaaaaaaaactaactacacatagaattaccatatgatccagcaagtctactattgggtatttatccagaggcaaataaacttgtatcaaagggacacatacactcaacgtgcttatcatagaactattcacaatagcaaagatgtggaatcaacctaactgtccatggatggatgaatggataaagaaaatgtggtgtgtatatatatatatacacctctagaggtgttcactggttacttagggtacaccctatgtaaatgaagaggctaaagtgaagttacaaagttatttacttggtgtacaccctatgtaaatgaggaggatgaagtaatgttacaaagtcatttactgagtgtacaccctgtgtaaatgaagaggatatttcctgtcatagctgaagtgtttccatttgatttagttctaggaagtccttaggttccctgcctccaggccctattctcctgtctcaatttcactcagcataatgtcctctaggctcatgcatattgtagtgaattcccttccttttgaaggctgaatgctattccattgtctatatagagggtgttttgtttatccactcatctgctgaaggacacttgggttgctttcatgttttagctattgggaataatgctgctatgaacatgaatgtacacaattttatgcttttctttctttcttttttttttttttttgagatggagtctctcgttgtgtcacccaggctgcagtgcagtggtgtgatctgagatcactgcaacctctgccttctgggttcaagcaattctcctgcctcagcctcccaagtagctggaattacaggcacccgccaccacacctggctaatttttgtatttttaatagagatggggtttcctcttggccaggctggtctcaagctcccgatctcaagtgatctgctctcctcagcctcccaaagtgctgggattacaggcatgaaccaatgtgcccggcccacaattttattcttaatggaatttctccctctgctttgcttttaggcccagacccatggaaagtggcctgtcaagtggtacgctccggaatgcatcaactactacaagttctccagcaaaagcgatgtctggagctttggagtgttgatgtgggaagcattctcctatgggcagaagccatatcgagtgagccagtcctgcttcattttctcactgtggggccattagaacagataagcaccagattgtctttacaacaacctgaaaatcctaatctgagtctctcattatcttttaccagtaagcagttaatgtgccctcagtctattccaaactgagaatgaaatatctgatgctcactgaagagtgtgtttttcccattgtgtgtcaacacatgtaaatatacacaaaatataacccagatcattactcattagagttgaaatagaaataatgactatttacagtatcttaattacattttttagatcttttaattaaaacatatataccaaaaagggcacaactcttagcatgcagtacagtggttttccacaaatgaaacatacccatgaaatcagcccccagatgaagaacagaaccccagaagcctgtttcctctgcacacacagccttccccaggggtgacccaactgactccaacatcacagattaagtgctcctgtttttatacttcgtataattgaaatcatacaatgtgtactccttcatgtcttggagtggctgttttgttttgtttgactaacacctttaaaaaaaaaaaagcttatgcatatcttgcatgttgtaggggatgaaaggaagtgaagtcaccgctatgttagagaaaggagagcggatggggtgccctgcagggtgtccaagagagatgtacgatctcatgaatctgtgctggacatacgagtgagtacctgacactgactgtgatgtattcagatgctctggaaacaggtgaaatggttgggcgtctaaaaaaaaggataaagttcaccttttcatgaatcaggaatgtgcccgctttctaaacaaacaacggtgggggctggtcttgctttagagaccttgctttctggcccatgcacttacatgtagtagagcctaaagagcaagtttagatggggactctaacccgagtgtccaaatttaaatgtcgataatggtggagagatggggcaagggcagtcaaagtaaaaaagtgtttgtaagagtttggggctggatgccatttttggcatagaggatggcagaagcactcggtaggggatggtatactttcctgactccctgattaccatgagcagtgaggggtgacctcggactctggccagctcacagatacattggctaaggttgcacttccctagaatctacctcatccttgaagtggtggcctcagtccaccctgactgccgtcatacgtctcgcttagtggatcccaggtgctgttatgcttttaaagtacacctggcattattcttaggtgatgttcagggcagctcagcaaggaaggaaaatgcattgccactgaaaattaggagtacagttttgccaggctcagcagcctgcttgtgcgtgcatagcacggtgaccccaagccgccatctccagttccctggtactgaactgtgcacacagagcccacacagctgagaatcgatgtggtttgtgatcaggaggacatcacaaatcctggccatggatttgatgctttgcggaatcaggtttgccttcagatacagctgacattgccagagcctctgaaagatgagggctattccaaatgctgcagatgccacctgggattccgagacctcccctccccaccctgggagtatcactctaccacaattgtgagtgacagggaaataatctcattctgtatctagaaaccacccagggggcagccacaaaggcagcaggcaaactgtgggtatatgcttccctgcccctgctgctgccgtggctcaggagaggagcctggcctgggccccggagcatcttctccaaccccaagtgttagtgcaacagggagagctaagtgtcagcaagagggaagtgctactcatggatctaagaggatgtttattcctaagtcttggcttaattctcccagtgcctaaactagaatcgtaagaaccattggcaggtaggcactggcagcactggaccctggggagggcagcccttgggcacgtggcagcctatgaccctttactgaaagtgttctttggtccagcctgcagctccctttgcaaggcttcccttcttgtagaagggtgaggagggtagagtttaaaacattgtgatacaaatgcaaaaactttgaattaaaaatgaactcgcagtgggggagtttttgcatttaacgttgatgctgatctatgtacttctgtcgattcttctttgtggtgtgtgtttaacagtgaggagtgaaaggtgggtgggaagagagcagggtgcgcagccaggggcaccacctcccacttggctcccaggtgggtgcagtgaggctgctgaataccctttgggctcgtggtgtattcttgtgactcaaggaatcaggataggggctgctgggccgacctctgtcctccatggacgcacgtaacagtgggcagttatttccagagtggtccaccaggggcagaccggggagggaaagcagtctacgtgatattcactggatgttcaccagaattacagcaaagtagagcagtagaacagtctccttaagagagtattctttctaaacgtattttcccgcctggagatttaagatggaacctgagtgaggttcacaggcaggcaatgtctttccccttggttcccaccccagtccgctctgcaggggtgcatttcagtgagttctgcaggcttggaggagtcagctccagggcacaagccccagtcaaaaggaaatcatgacaatggcccatgccccatattagaaatcacagctctttatcagactttgatttatttcccaacaaagctatatttctgaaggttacagtgtttctagtagtgacctcaaacagggttgggggaggtggggagatgttctgaaacttttgaagcagctgtgtttgtctggggtaatacctgagctcgttgcctcacgccaaggaaatcaaagatgcagacacacaagaagtgagtttaagagcagaggtttaataggcaacagaaaagagaaaagctctctttcctgcagagagacaagggctcccaagtggttcttccggctccgtgtggaaatgcaagggttttatagacgagcttgagtctgattacatagggcccaaagatcggttggacagccaggccatttacataacacgaaaagaaactggctgccccaccctaatcttttattatgcagatgaggtctctccttggccgacgccatgttgcctgctttttttttttttttttttttgagacggagtctcactctgtcgcccaggctggagtgcagtggcgcgatctgggctcactgcaagctctgtctcccgggttcacaccatactcctgcctcagcctcccgagtagctgggactacaggcgcccgccaccacgcccagctaatttttttgtattttttagtggagacggggtttcaccgtgttagtcaggatggtctcgatctcctgacctcatgatccgcccgcctcagccttgttgcctgcttttttactgcacacgtggcaacaaggaaagtggaagagggaacctccatgttgaatatccctggctccagggatcccttttctattgacacagctgccggcatttacctatgtgagcttttagcttgcttagctatgcttgcagcttgatttttcaggctgctttttgttataaaagacatgatttaggagctgctttttattgcaaggaaaccttacagaggactctgttaccctcactatctgcctaaataatttctttctagctctgaatcactttgtctaaacataagaaattcaatgaggtgcagttgaatgaaaaaaaaggaaaagattccttggagcagggccacaaggagaactcagaagcgccaagggctggtcctggtaacccaggctattgcttgaggccctccagaagatgcagggggtccctcactgcaggcattgtcatcagttccagggtgtggtcctggagggaattcaaagggacttcccagcctcaatgacaaagccctgagaaggcagacagcatccctcacccttgtaagacagccagagattacctccaacccctttttagtcttaatggactcttcagctggacctagaaaccaaattgataccaggccagattaacaaaagaaaagcttaccaattttactagttttacatgtttatggggatcctcacaagacagtgaagtctaaagaagtggccaaaacaacatgcttttataatctttagacaaagaaccatacatttaaggagaaatgacaggacaaataaaatctggctagaaggagtaaattttctagagaaggcgctaggagatatgaggagggtgtaaaaccagtggaagataagggatactgtgttaaatatgtttactcaggcccattgcagctccaatgcccagtctctgatgataaggggcattttctcatcctgctacaggaagggtctccttcccagaggaatctttatggcttgctgcaggcatgaagagacaggtcagttagtcctatccgaaactacaatgtatccaatattttcaactcaaaataatcaatatcccaatctggcatattttgggatggcccatgcttcactccttccccctctcactttccaaagaggaaacacaacatcagagtcctgccctgtgcaggtcactcaaggaggcagcgtgaaagccaggaaggaaacactggccctaagaaaagcaggaatcagtcaggaagccttccactgtagtgttttccagagccaagtcatgcttggggtgattaaagacaccagtggggaaagcccttgcaaatggagagaagttggtgctcttgatcctgaaaaacggtttcctaatagtcccagccctccagtgggggcctctgccgaatggagaaatttcctgggctctccaggttctctgagagtcagggaggctctagatgcggctcaaattcctgtttaaagatcaacaagcccaagataaaacatgaattcccaggaccttggtgagatgtcccctggctccctgcacaacctcagctccaaggctttcctctgagcggcacatcctctgagagccctgggtcattcacagggtcggtggccactgccggagctcctgctatgcaggctgccaccccaggtgcaagcctcacagaagcctcagaccctgtccctatcagaccttatagttggggctggggcagacaggcaataaacaataagctaaaaataagtgtgtcctatgatgtgtcttaggaaagggatgactccagtgggaattctaagcaaggagggcacaggggcctggaggatatcacgtgtatatatggggttttttaagccctctcgtgtcgaagtagtttctcacagttgcctgcagcacagaagcacattggagcttctagaatgtggtggattcaatgaagggactacaggtggtcctagtatattctctgttttgttttgttttgctttgttttttcattttttcctcagtagtaaacagccactctctccaaggtgatatatagagacagacagagagagcgggagggaggtagatgaagggagagaaggagggagggagggagagaaatagtctcattagcacaaacccaggtatggttgaagggggtttattatgagtaacaaaagatgctgctttcagcccaacaatcaggaaattccaagggttttaggagctctgtgccaggaacccaggataaagaccatatatctctttatataaaatcacacactggaaactttaaaagagaacagaaaattatggggagggaagcctcacacttccagcaggggctccagataggccgcctttagggattgcagctgagacctgcaggctaagaagcaaggttgagtgcagggatgaggggagaggaggagggtcactgggtacaaggagcagagcagaatctgcactctggcccgaaagcagagtggcaggccagggcaggccaggaagctgggcacgcaagggcactgcatcaccctcctgctgctgaagcacagctgtgtcccagcttcctggaggcagcatctcccatggatgtacaggagagatttcctaggagacctgaccaggtgtttttcctgaggacgagtctgtattcctgtttccctgcatttgtttgctccttggctgctgggcagatgaacccccagagcaagatccaaaggtgctctttgtaccatttggatccccacagttggagcagagccccctgttttgcaaagatgctgaagtgtgttctctttgactgtagaagtttaggagcaagacagaggctgtccctctgggtggacacatgctcctgtaccagaggcttggccaccatatcccctctcggaacacacttggtggccagagacaaagcccctctcagtgacaccctgggaggcccgtgtccccagacatgaccacagatggctgaccacactgatcaattcgagcagttttatcattttgctcactattgaaagctataagagaaaccatgtattttgatgccatttgacaaagctacccattttgatttgtagaagccactctgctcttataatgatgagtgagtcttggtcctgatgcgcgttctatggctgttctcttgtgtcgacattgaatcatatgaaattgccattgatataggtcaaaatggctgaatgtggacggtttcctacaatttaacctcacattctgtttcactttttcacttattgtatttcaacttcacccacttgcaatatatccagaaatcttgcaaaataagaaaaataacttctaagtgaggatcgattatcagggttttagtacttacttccaactgatctgtacaggatgtctgtgtaagacaaaacagaagtgtctgtaagtgtttgtttagagactgcgaactgttaatgcttttgcccatagtttactgacattagtgcctccctggccagcagtggcagtaaggactggctatattaaggtggatcatagacaagccctgggtctttgctcctgccatgacatgttttgagctttcctaagaacccatatcaacagcccattttcagaaaatccagagccatcgattagagcgtggaaagggagaattaaagttatgttcgtatttcttctcttaacaagattatgagtcagatgttgactatatctgcagaacatttgccaagtattttcagacacctgttttgctaaaatcacagagtgacagcctcttcgtgttgcctgtggcacagaagcatattgtgtgccgcatatctgaacctggggctaaaacactcccagttctaatgcaaaaagtctcctactttagggtggacatgaatcaccgggaggtcttgttaaagtgcagatatgggttatttaggtctacagtaggccgacactatttttgacagccttgtggtcaccctggggtggggggcacagggaccacgctgtgagctgcaggccctagagttagccaccagggagcagcaccactggtactcagcctgcagaggccctgcttgtgatcagcaatttttcacaagcacattgacaaacaagaatgcatctcttccattccagtgtggaaaacaggcccggattcgcagcagtggaactgcggctgcgcaattactactatgacgtggtgaactaaccgctcccgcacctgtcggtggctgcctttgatcacaggagcaatcacaggaaaatgtatccagaggaattgattgtcagccacctccctctgccagtcgggagagccaggcttggatggaacatgcccacaacttgtcacccaaagcctgtcccaggactcaccctccacaaagcaaaggcagtcccgggagaaaagacggatggcaggatccaaggggctagctggatttgtttgttttcttgtctgtgtgattttcatacaggttatttttacgatctgtttccaaatccctttcatgtctttccacttctctgggtcccggggtgcatttgttactcatcgggcccagggacattgcagagtggcctagagcactctcaccccaagcggccttttccaaatgcccaaggatgccttagcatgtgactcctgaagggaaggcaaaggcagaggaatttggctgcttctacggccatgagactgatccctggccactgaaaagctttcctgacaataaaaatgttttgaggctttaaaaagaaaatcaagtttgaccagtgcagtttctaagcatgtagccagttaaggaaagaaagaaagaaaaaaaaaaaaggcctggatactgcttttgctgtctctgttatgagatggaagacttacatgtttgtgataaaaggggaccatgagaatgaattggcttggcttactttccccctgaaatcctctctcctgcagactgtcttgaagacctggtgactggtaaataaagccctgcatggaggctgcacagcaggggcaagaggcccatcccccagcatctcactgaggacagcttcaggctgccttcctctgaacgtggtccacaccttcctctcctccacagagagggtgccgccagaatcccctgtcgctttctgtgtctgcaatggggggcagcacagggatcaaagccatctaaagagtttccaaagaaagtattaattcagaacaagccaaagaccctgagcctcaccacaaacaggccttttggagtgtgaatttgagttgaagatacaagatcggagaatgattttctggtcttaactaatcctcatcttcatgtttgatctttaagaagtcatcacccattgatttcagttttgctgtacctcttgaaagttaaagagacatctcagcactttaggaggccgaggcgggtggatcacttgaggtaaggagtttgagactagcctggccaatatggtaaaaccccatctctactaaaaatacaaaaattagccgggcatggtggcatgtgtctgtagtcccagctactcgggaggctgaggcaggagaatcgcttgaacccaggaaacggaggtcgcagtgagccaagatcatgccactgcactccagcttgggcatcacagcgagactctgtcaaaacaaacaaacaaaaaaacaacttaaagaggtaatttagccatcattcttatgccagcagatataaataaacttggacccatctggtcttcagctaaacctgagacattttaaagtgcatggacagccatggacagcaggccctcctctaacaggggatgcaaggcatggagaaagacaatcagtacccaagctcagccacagaagacaggagtcactcatataacttgtgtttagaagtttttggtagccacgcacactttctgaaatcacactatctggtggtttaatcatatttttaaagacagaatccctgagtgctgagcagattctcaaaacacatttagaatccctgaaattagaaagatcaatgacaaaatatctgtcagccaggccacaaacaggtgtaaaattatgaaaggagtggttggatgtgccaagtttggtaaagtggtgactgcatctgagaaagaggctgtgaggctgaactcttggtggcttccttctgtaacttccagagggagtcttcaacacaggccccgtgctcgtaggaatacggtagcacctatgtaggaagtgcgtggagttttctgtcttctttctgtgtgatttttggcctttttatcagcacttctcccctcccaggagcctggggatgccaaacatccagaatgtgatgggacaagatgggggcaggggcctcacctccctgcagaggtccggccaggtctccttgtccctggacaatctcctgagcctctctgcttggtggagcaggcacctgtgtgcagaattcccactgtggccagcacgaggaagtcttttctagtgaaaatgtgtcttgtggtcaggaataattatcctttcccctgtagccaccaaggagggcaaatagagaaaggtaacctaattgaaggattggtcatgtgaaaagggctacatttgggaagctgggaaaggcctccaggcttctagagcagctagcttgggctggattctcatacccaggctgccccttggattgttctacccaagcttttccctggggtctgggctcactccataaggtaaggtgccttttaccttatggtccttctttagcaggtaacaaaggagcatcaggggcaggctgccctggtggcatcacactggctagtgaggccgtgaatatcttgtcccccagcagggccgacagtttctatcacagaaaacagtgtgttcagtggtgaaaatcgttgcatgcatgttttcatctgagcgtgtccttctcccatactccctatcagccagccctgcctgtagctgctgtatggtgattgcacttggacatcagtccaatgactgcaagtcggcctggattttcacttgcagaggctacagctgcattgtcaggtctcccagccctgcagagagctccctccactggttagcagtgtgttgtgttttccattcatttcagaagagctacattgtgtcactggacatttttaaaaactgtgatttttaataaaaatttaaaatttg

SEQ ID NO: 6 - DNA, 250395 bp, Homo sapiens
gacagacgaggtttgcgcttggctgggcatgttccgcggctactctgcggcgcgccaggcccccgctttccgcaccccgcgaccctagaagccaccgaaccgccggcgggccatggccactctgccgagcgcagagcgccgcgcgttcgcgctcaagatcaacaggtaagacgccccccgcggcgcgcaggttgcggccggacagcccagcgctggtgtgaagcggagcttcgctgcaggggccgaggccggacgagtccattcgcgtccgcggcggggcgcgcctgagacctggggcgcccggttcccgaggctgcggcggtggagccgctggacgcgcggcggctcctgcgctgggcccggcgaggtcctccccaagaatctcggtgctcctggatgtcctcagccgccggggatcccttccccgaacaacctcgcccgctccgccctccaggttcttacaggtggccgggtcccagaagggtgataggcgcctgggtaaccgtgttgggcgcgccacggagtgtctcataaacggctccttcctttgaggcaagtctgagcgcggggggaagaagtgaagtggctgaaattagagttgcgtttgaggcaggctgcaagccttctgtcgtcctgagcaaggctccgtcctcgcctgcttcattattccagaaagagcttggctcctggtggcatcgctatttttataccctggtccaaaggagccatgaagtggaaaaagtgattttttaaaaaatctacacttaaataaaccaaaagaaatggcctgtggctgacattttgagatttacagaactccagcaaaaagctaaggactgggggatcccaactcaccatccaattcctaatcaaagttgcacaaactaaatatgtaagcacatttactgctcaaagttctcagtaaaggtgctttaactgcagtttttcctccactaaaaactgctgacaagtaattgggacatttttgtcttgccctgagaaagctagactgtctagttaaaagataataggaaactcattctaaagtgtcaacttattctattgcccacagggctgtccgatttgttaatcttcacttagctgagcctgtgaaaggtggattccaccgtaggttcatctttgtgctgttagtgtgtgaagaggtttgaacaaggaattaaaagcctagaaaaacaaggcgataaggtcttctagagggcatatcgagctttattgacgattttatttccacttgatacgtgactgccagcaaactgtttctcttaccttactatttcgtcatctgtaaaatgagtttaattatttatgtatattgcatattaatgttggaggccaaaaggtactagtcaaaaggcataaagaggctgggtgccatggctcacacctctaatcccagcaatttgggaggcccagatgggaggattacttgagcccagagtttgagaccagcctgggcaacatagtgggacccctgtggctacaaaaaaataattttaaaacattagccaggtgtggttgcatgcacctgtagccccagctattcaagaggctgagacaagagcatcgcttgagcccaggaggatcacagctgtgatcatgccactgcattccagcctgggtgagagagtgaaaccttgtctcaaaaaacagacaaaaaaaaaaaaaaaaaagcaaaaacaaggcatgaagtatatcagggatctccctatgggaatttttttctacattaaggttcatagctgttgcatgccaggaggggtaattcattcaaggagtatagggaatcaaactgaagttactgatgggtgtattatttgctatagctcctgatcctctgtctttgtgaattttagatcaggaagtgtgactggggcagaaagatgttagaaactatggggttgggcagggttgatctggggtgagtggccgagacccggactaatcctacaggcagtcttgcaagcaactgcggggtcggtgtcacctgggggttaagaataaaggccctggttagtgtctgatctgcttgcaaattggctctctgctacaaagtcactgtgcaacattggacatgttacttaacttctctaagctttggtttctttatgtgccaagtagagttgatcatagtacctacttcttatgactgtggggaggattaaatgaataataggtacaaagtccgaattgccaagtgctggatgtgtaacatacacattggaatttagagacagtacagaaaaaataatgcaaaatgtcttgttaatgattttcatgttgattgcatgttgcttgtagtgtctggctcagaataaatggtgaataattcttagttgccatcattaacattacaatcagcttcactgctgtcattatctccatcatcaccatctttgagagcctaagatagaaaggtaggaaggaaagctgaagttggagagcttcaggcagagatcagtttgggttaggtatggagatgccagtggctggctgggagctttcttggggccagtgtttctccgcctgtgccttccatctggtgctgagaacccaaaacacattcaatggaagaaaatatgtgatgaaatctgatcaagaagagccccctcaagtttaataaagtataaaaggttctataatcctcaggcaagaaaatggattggaaattcgtattcttagagttctgttttcctttttgaagcactctgtgtgttgtgtgggagagttatgctaaggagcttggcagaaattattattcaaaggagcagattaataaggacatacctagtattcatatatcatttaatttcaccatttattgtttacttattgtgtcccagacactatattatacagttaatggattttatgattaaattctcacaaaaagcctatcaaactcatgaagtcttgtacagaagaggaaaaggaatcttggagatacagctgcacaaggccatgtaattttttcaagaccatacaaccagcaatggcagagctgggattgcaaactgctccaaagactgtgctcttaattgggccgattgttattttgatgcatatgtatcccaagaatttcctttaaagcaagaggggaattaatttttaaaaaatcatcattttggtagcagcattggcaaagtgttctgtttctgattagtgtttaatatataaacattaacaatgtgatgttttgcaatgttgaaggtggaaaagaaatgttttcccttacgtgcctacctattattttttttaaataggtcaaattccaaaagtaagactgtgttgaaatatggccattagtacattcagcatgtgctcatgtttttcaccttactactcagaatagtgtaaactatctcttaaaaatatttgtgggataaaaccagtgtgcttcctgttaatgaagtattcaaatctgatatattaaaaatattatttgtaaagcgttcagttctgaccacaccagtctccagaaggagtgagcagactatctcacagtctgagaagaaaggtgaaattaattttcttgtaagtgctatatacttgtcttcatttccatttttttgttgctgacttgcgtgccaaggaaagactagatctaagttaggcagttcgtaataacatttgcgtttgggatttcaggtgctgctgcattaaatgtcataacatggtacttgtgggaacatctagtcttgttaattgccttttttcttactggaatttagtgcctttgtagattataaaaattattactagtactctgaaaatttattaaacaaaatcttagtgtctttcaaatacagaatagatgtaaaatttgatcaaatattaaagtaaaataagaaccttggataaagaggacgaaagtgtagaatgcagaaaaaaacattaaccctcttgtggacagtcaggattgaaaggaagaaaaaataatggcttacacttctagaatgctttctatgtggcagagacagttctaaatatttacatatcgtaactcattcacctctatgagataggagcaatgactatctccgttttacagatggagaaactgagtgcagagaagatatagaaattgtccaaactcacaaacaactaattaaggtcacagctgagattcaaatgcaggcagcctggctccagagtcttctcttttaatcattataccatgctgccatctcagttttattttaaaataataataggtaacatttattaattatttactatgtgctacatattgtgctaagaactttatataccttcatttcgtcctttcagaaaaggaacaaacagagctgggtgcactggctcacgcctgtaatctcagcattttgggaggccaaggcgggacgatcacctgaggtcaggagttcaagaccggcctggccaacatggcgaaaccccgtctctactaaaaaatacaaaaattagccaggtgtagtggtgtgcacctgtaatcccagctacttaggaggctgaggtgggataattgcttgaacctgggaggtggaggctacagtgagctgagatgtgccactgcattccagcctgggcgacagagtgacactctgtttcaaaataaaataaaataaaaaataaaaaaggaacaaagtattaggcataataatcatcaccagagagtgattttatgaaagacaaaaacaaggtggcaagaagagagaataaagttacataaagatagcatttaagaacaaccacaggctgggcatggtggctcacacctgtaaccctagcactttgggaggcctaagctggtagatggctcgagcccaggagttcgagaccagcctgggcaacatagcaaaaccctgtctctacaaaaaatacaaaaattagccagctgtggtggcttgcacctgtagtcccagctacttggaaggctgagatgggaggatcactcgaacccaggaagttgaagctgctgtgagcagtgattgcgccactgcactgcagcctgagtgacagagcgagactctatttcaaaaaaaaaggaacaaacccaataattttgggcataacgaccagagcacaatgagctacagagagctttctgagaagtatttgctaattttatctgcaaagataatacaagcataaaaatatatgtattcaaatgtatagatgtgtatctgcagtgagagcagagctgttcctcagtagtgggggtggctggcagagtgaggtagtgtgctttcaggaattgctttatttgtctgatgtgttctagaccaaagaccaacagaggggcttgggcaatcagacacagaatttttggcctttcacatttagaatcggttccttccagattcttggaaaaggtccatttgtgctttaggcatctagtgctattctgaagatgccttacaaaatgtatgctgaaataaccttctaccagggtgaattttcttcatttggagttctttgagttctgaccatttatgtatattgatgaagctaatgtttacttcttcatagaccagtggaaagaaaacgtagtaacatgtagttgcccagggaaagatgaagaactcaggggaccaagtctcccatctcaactccccataaaggtagtgatggaatgggatgatgttaaaaacacctcaactttccgtcctctttaagggaccgtgagaaggtagggatgttaccatactcagacttcttgctgagaaagctaagaaacaaaagcatttagtttttttcagtggcaggtgcttattaacgtttggcctatttgataaagggttaaagcaacaggaatgtgctactgctgttcccacaagcagtagtctaatttctttctttttttttttttttctttttttgagacagtcatgctctgtcgcccaggctggagtacagtggggccatctcggctcactgcaacctctgcctcccggattcaagcgattctcctgcctcagcctcctgagtagctgagattacaggtgcgcaccaccacgcccggctaatttttgtatttttagtagagatggggtttcaccgtgttgttcaggctggtctagtcttacccagtcagcagcagaaaggctctctgggctctaggtaaacacatgaaatttatatagtgtgtttaagtgtggttcctgtgcttctggagttggcacagtagtggtaccatttgctgtatcgacaacagtgggggtatagacgaaaaacagattgacacctctgaaagtatatatgaacacatgtcgatgcagcatttctggtgaaactaagcaaattgataaagttggcctagggtacaagacattatgtcatgtcccactgcattatgattaaacccaagattagaaaggagaaatgatggcaacagaaccagtttctccagctgtctattctcatgttcatcatcacagataggaaagggcagccggccctctgcatctgtgggcacatccctggattcagccaaccacagatcaaaaatatttggaaaaaaatgtagatagttgcatctgtactgaacatgtacagacttttttcttgtcattattccatacaaaatatagtataataactatttacatagcatttacattgtgttaagtattataaataatctagagatgatttaaagtatacaggagggctggccaccgtggctcatgcctgtaatcccagcacttttggaggccaaggtgagtggatcacttgaagtcagaagtttgagaccagcctggccaacatggtgaaaccccatctctactaaaagtacaaaaaaaaaaaaaaattagccaggtgtggtggcaggtgcctgtagtcccagctactcaggaggttgaggcaggagaatcgcttgaacctgggaggcggaagttgcagtgagccgagatcgcaccactgcactccagcctgggtgacagagtgagactctgtctcattaaaaaaaaaaaaatcatgaacaactctgcatgtaaatcaatacagagctgcattataatttacataggctgtataaaatcctgttgattagatgtaaaatgatttattaaattaattttctattattgggcatgaagataggttccaggctgggcacagtggctcatgcctggaacctgcctcccggtgctttgggaggcagacacaggagaatcagttgagcccaggagttcaagaccagcctgagcaacatagtgagacaccagctctacaaaaagcaaacaaaacattaggcagacagggtggtgcatgcctgtggtcccagctacatagaaggctgaggtgggagggtcacttgagaccaggagtttgaggctgcagtgagctatgattgcgccactactctccagcctgggccacagagtgaaaccctgtctcaaaaaaaaaacacaaaaaaccaaaagagataggttctgacttttcacaatagtgtatagagtttgatggagcagtcttatacatacttttttctgcgctagtgcaaacacctccttacaaatttctaacagtataattggtcataggaaagaaacatttttcaagcttttgattgccaaattgacgcccagaaaaggtatacctgtttctgctcctaccagtggccctacgaatgctcctttccccacattcacacccccaccgagttttatcattcttttaaatctttatttgccagtgttgacctcttctcttaaatgcctgtaacctcttcctgtttagcttctctcctaggtcagagagtgaactctgaagtcattctttagggattaaaatagtcatgcatttctccttttttctttgccttacatgcaaccataaatggtgagaacttctatcctttttcactttctgcttctgttcctttaataggtggattaatgataaaggtagattgttcaaacaacttagttatttcttaattttgttgtaagctctagttgccagactttaaactgtgctttttactttgcttaacaatgtaatccaatctacctcctcctttgggtgcctaagccatagcccttttaaataaaatagcaaatggaaaatcagaatccctttctatcgcaaaataagagtccagattacataactcattgtatgtgttttcacttggatgagagaatagagagtatggacctctttcatactttttttttaatgttccttttcctctagaattggtttctggggctaaaaggaaacagtagttagtaccactctgctcagaaacctcaaaaaacttcgacttctgtcattctcatcaaagggcaaaattcattgttcttctgtgatagagaccaaaaatacaaatagctaaactggaactaaattaagaaaaacagaagttaataaactccaccgcctcactcccatctcttcgtaagttagtaggcttgtaagtcctaggctggttagttcattcatttgttcactcatgccagccattgaggattattgtgttctaagtgctgtgctaagccccagaaatacaaagacaagtgagtcatgggcctgcctgcaaggagtgaggagatttactcaaaattgagagctggaaaaagaaaggcactttccctggcctcatagccctccgtgacttcaaagtattcctctctggggtcatgccactagggataatagcattatccaaaaacatttttggaaatccttttagaattattctcagggactggagtacatttatttttaaaaagaaacttggtgttttaaaatctttttttttttttagggagaatctgctttattatttgagaagtttcaaaaaatatagaaaatacagatgataatatggcaagtatctaaaggtctccacttaacagaattaacatctgttaacattttgtcacttttgctttagttgttttttttttaattaaaaaagagaacattacagataaatgtgaagtccctgttattctgttgcccatttctgttctccctgctgctccctgagagtactaacacaaaggtgtacttctggggtgtgtgtgtatatgcatatccataaacaatatatggtatagcttctggagggatccaaagtcattagcactcaagcaagcctattaaataaaataatatcagcttgagttaaagataacatatagccgtgaaataacggagctgatttttaggtaccttgtcaaatagttctgaaagtaattgcaaagaggagttccaaaagtgagttcagaaagacagctttatcagaataaattgcatggtactgcatacaggaaactataaagaacaacggttatttagaactgttcattctgacagtgtttttcaattactccttaatattataaccacttactcatttcctgaaatcaccaggaaatttttcaaaaagatttttctcccccgatgaatatacccacgatttgcatttgacccaagataagcagttgagtcgataacatgttaatttttaaatacatggttttaaaacacagaataaaaattctacctcattgcttggagactcaattaaggagagtatgcacattagcaaaaagaagatgtgatatttgctcagaagtcttgaagtggatattttggccttcgtatggctgaatggtcaagcttgactctctcgtttgctcagggaggcccagtccctctgctgccacgggtagaaatactttttcctaaatcgctgcttcttctcactgccatacagagcaatattcaggacacagccaaaaccttctttggcagacctttttgagttctctctactcagctttctgctgtgtaatatgagcactctagagaagttgggctgtcctcaggaaattacacttggggtctgtggttccccaggaagacaaactggagctccctaaggggtactagtcatcatacggcatttatactagcattgcagtccactttcacctatgcaagtagaaaaactcaggctcaaagtccactgacaatgcaggagtcccttatctgctggttaacataaatgttgttttaagatgatggccatctgttgtctgtgagaacaagactatcacccacctgttgacatgctggctggtttaatatcttactctttcattccaaataactacctggtctcacagatccccttagatggggtatccaatttacctcctgtaccttattctctgtccaataatttcactcaaatcaacaagatattttattgcctatgacttcctctaggtattacgggagattcaaaacacaaacagacaagcagcctatgccctcagaatccagctggggtgagtgggtgactataaatgcaaaagttagagagcatggggaacagtgtttgattgtgtggctggggaggggtaaggacaaaaactcagagagagagaagcctgtagccctggctacagaagggcaacacctctgaggagatgagtctcagctgggccctgaagggaggtgactcacagatgaaacaaacctggtgggaagaatagttagcagtgtgcagaaggcattggaagggattccaggggaggagtgaggagggagccacagtcattccgatgtgaggtagtgagatctgggattagactgggtcatcagaatggaaaaaaagggcctgcttctgcagacagtttaaaggaatcagctggatgtgggaagcaactacatacttattcattcattcatttcatgcatattgcttatagcctactatgtgcctagcactattctaagtgctgaggatagagtcatgaataagatagacagggttcttattctaaaaaaagtaatataccagtggggagacaatgaagaaataaaccactaaataaacaaggaaacatcagataaaataagtgtgatacagagaatgtaaacgggccattgagagggcatggattctttagatgggatggtcaaggaaagcatctcttagagaaaaacctctgagccaagatcaagcaggggaatgacgaagcacatgactgaggcaggagtaaatttgatgtgttggaagaaaagcaagaactggtctgtctctagtggagtgaatgaggggagaggaggagagctgaagagggaagttagcaaagaacgaatcacataaaagccttaaaggcaatggaaaaaatttaaatgttattcaaagtgcaatggtgtattagtccattttcatactgctatgaagaaatacccaagactggataatttataaagaaaaaaaggtttaatggacttacagttccacatggctggggaggcctcacaatcatggcagaaggtgaatgaggagcaaaggcatatcttaaacggcggcaggcaagagagcgtgtgcaggggaattgccctttataaaaccatcagatctcgtgagacttattcactatcatgagaatagcatgaggaaaaacctgcctccatgattcaattatctcgcacaacatgtggggattatgggagctacaattcaagatgagatttgggtggagacaaagccaaaccatatcaaatgggatggtttatggagcagggcatgatgcgattgacttttgtgtttaaaagatctattgtacaaagaagcaaggaaaccagctgggaggcagtggagaatccaggggaaagatgacgatggcaaaactagagagcagagctgagaaggagagaaccaggcagctctgggataacattctggagctagggctgacgaattagatatggggtggggcaatgaaaaacaaaaaaaaagagaaatcaagatgtctccagggttggatattgatgcttttaacagagattgaaaagactggaggagaagcaggcttttagggtgaatcaagggtttaactggggacatatggagtctaagatgcatgttagacattcaagtagaattagctactatgcagttttatttaggaatctgaaactcaggggagaagtcaagactggatatttaagtttgcaagtcaataccaaacatatttttacataagaaggaaaaaatattgatatgattttgataagtttttaatagccagaaagctatatgcgtaatatggtatcattttaattaaaaaataaatatatgcataactctctgcagagataaatgatcaatacatataacaaggagagaaccagaaggacatacgccaatatgtcatgagtgttatctctgggtagtagaattattgatgacttttgtgtacttgggacatgcatgtatgagtgtatgtatgcatgcatattttgcaagttttcctcaaaggatgcttttgtaattggaagaagaagcaattataaaataaatggcacaagatttccatcctggtcaaatgggataaggatgatgccaatgagaaattatgaaaattggaaattagacttagttttggggggatgattttttacttccctcgtagaggttttgtttaagacgatgtagtagactgtacctttacatatatttgctgtccctcccgatgggaggattttacttttcacctgttgaaggtgatgtggtcacttggaggtgaagagatagcctggactttgtcacattatctttctcctattctaaacaatctgcagcgttccaggtggtggatgatctgtcatcctgcatcctggagtaaagatgattaaagcagagctgcagctgccctctgaaggcctttgtttttgtaaaccactgagatttttgaattgtttgttatctcaccataacctagcccaccctaacacagatgaacataaaatacagaacatttctattgggcggcttgaaatacaggcttggggcatcagtggtaggtcagcatggaaaatgttgattaaaaagtcatctgtgaggtggagattgggactgaagaatggataaattttctgaatggaaagtataaggggaagagaagaggaatgggcctagaggaagagtcactgtcaatccatacaaaaagaagagatacgaaaagataggaggggggatttggccaacacatggcagaccgttgtagtatcagaaaagagagctaggagggtagttacaaagatcacatgccaaattatgagggcaaagagccattggatttaccctgaaggtggtcattgaaaacctctgaattagcagttttagcggagctgtggggaaggaagtcaggtttcataaggttatagagggagtccatgcagaggaaatagaggaagctggtggaggccactcctttaaaaagcctggatgaggccgaagagaaatgggacaagtggtaaccagaaggcccctacaaggctgtgacttttacacaaatatgacatacaatgctgaacaaaggatgtgctgatcttacagaggaaggatgtgttttattcccaaaaaaaactttacatatgggtaaagttattcaagagaccctgtgctgtctaatatgcaacaaatttttctttgcaccagcattaagacttctaacaataagtaaaatattctatttagatactttttacaggagattttgaaactctgatgacactgacatactacctttcagaacatggtactgtttaaaattttattatttttatatttatcttcatatgtttaaatttgaaaaattacaggaaagagtacttttataattatgtttttctgtttacaaaccacctcctgtgtgctgaattttgcctccccaacatttttcaggggagcatggccctactcgcactttgagttcagatttctggccttcagaactctgagaaaataaatttcttttgttttacgctatccagtttgtggtagtttgttacagtagtcctgggaaactaacaaaccaccccaaagtttagtgacttaaaacagccattattatttctcacaattctgtgggttggcaatttgggctgggctcagctggacagttattctgctggtcttcctgtagacattcacatggctgccattatcgggtggctcaagtgaagctgtagggtctaagatgggctcactcacaagtccaggaccttggtgctgactgttggctgagctttccctcttcacacggtctcttgttgttcagaaacctagctggtcttttttgcattcttagctggtaaagggaacattctaagagaaggaaggtggaagctgcaaggcttcttgaggcttaagtctagaactctccaacgtcacttccaccacattcattggttaatgcaagtcataaggcaactcagcttcaaagagtaggagaatagaatcaacctattgaaaggaggggctgcaaaatagttggtcattttaaccaaccacagcacccaaccaaaaaaattaatactatcccgtttcagatttcagaatgtttaatcagaaggccttgtctttccctacgtatatcacaatacccattttagtggcagagaaactgagaccaaataaaactgactcctttaaagttaccaagtgagtcatgctttgtgagagacatgaagacaactatatgtctggaagagctaaacatagtcctgcctggaggcaggtatatgaacttaataatcccttgagatgctcttaaatcccataattacactgatggactccagattgcagagctgtctggtccagagataaagcagcggtttgagagtatcagagagagaaggtgcctgaaaattgccacatgtccccaaaggcaggatttgaggctaaattaaatgataaagagttaccaagctctttattctcaagagttaccaaataagcttagaaactcaatgactgctgctgtctagtgttagttctggaatgggagaattaaaaatgagtagaaaaagaaaatagagacagagagactaacatatctgaaagataggtgctgtgggcagtcttagaaggatcacccctatatcaattaggattgcttttagctgctgcaagtaacagccaaccaaaccatccaatggtttaaacaaattaggggtttatttttttcttttcatttatttatttatttttaaatttaattttattattattattatactttaagttttagggtacatgtgcacaacatgcaggtttgttacatatgtgtacatgtgccatgttggtgtgctgcacccattaactcatcatttagcattaggtatatctcctaatgctatccctcacccctccccccaccccacaacagtccccggtgtgtgatattccccttcctgtgtccatgtgttctcattgttcaattcccacctatgagtgagaacatgcggtgtttggttttttgtccttgcgatagtttgctgagaatgatggtttccagtttcatccatgtccctacaaaggacacaaactcatcatctttatggctgcatagtattccacggtgtatatgtgccacattttcttaatccagtctatcgttgggcatttgggttggttccaagtctttgctattgtgaatagtgctgctataaacatacgtgtgcatgtgtctttatagcagcatgatttatagtcctttgggaatatacccagtaataggatggctgggtcaaatggtatttctagttctagatccctgaggaatcgccacactgacttccacaatggttgaattagtttacagtcccaccaacagtgtaaaagtgttcctatttctccacatcctctccggcacctgttgtttcctgactttttaatgatcgccattctaactggtgtgagatggtatctcattgtggttttgatttgcatttctctgatggccagtgatggtgagcattttttcatgtgttttttggctgcataaatgtcttcttttgagaagtgtttgttcatatccttcgcccactttttgatggggttgtttgtttttttcttgtaaatgtgtttgagttcattgtagattctggatattcgccctttgtcagatgagtaggttgcaaaaattttctcccattctgtaggttgcctgttcactctgatggtagtttcttttgctgtgcagaagctctttagttgaattagatcccatttgtcaattgtggcttttgttgccattgcttttggtgttttagacatgaagtccttgcccatgcctatgtcctgaatggtattgcctaggttttcttctagggtttttatggttttaggtctaacatttaagtctttaatccatcttgaattactttttgtataaggtgtaaggaagggatccagtttcagctttctacatatggctagccagttttcccagcaccatttattaaatagggaatcctttccccattgcttgtttttgtcaggtttgtcaaggatcagatagttgtagatatgtggcattatttctgagggctctgttctgttccattggtctgtatctctgttttggtaccagtaccatgctgttttggttactgtagccttgtagtatagtttgaagtcaggtagtgtgatgcctccagctttgttcttttggcttaggattgacttggtgatgcaggctcttttttggttccatatgaactttaaagtagttttttccaattctgtgaagaacgtcattggtagcttgatgcggatggcttgaatctctaaattaccttgggcagtatggccattttcacgatattgattcttcctacccatgagcatggaatgttcttccatttgtttgtatcctcttttatttcattgagcagtggtttgtagttcttgaagaggtccttcacatcccttataagttggattcctaggtattttattctctttgaagcaattgtgaatgggagttcactcatgatttggctctctgtttgtctgttattggtgtataagaatgcttattatttttatacattgattttgtatcctgagactttgctgaagttccttatcatcttgaggagattttgggctgagacaatggggttttcaagatataaatcatgtcatctgcaaacagggacaatttgacttcctcttttcctaattgaataccctttatttccttctcctgcctgattgccctggccagaacttccaacattatgttgaataggaggtgagagaggacatccctgtcttgtgcccgttttcaaagggaatgcttccagtttttgcccattcaatatgatattggctgtgggtttgtcatagatagctcttattattttgagatatgtcccatcaatacctaatttattgagagtttttagcatgaagcgttgttggattttgtcaaaggccttttctgcatctattgagataatcatgtggtttttgcctttggttctgtttatatgctggattacatttattgatttgtgtatgttgaaccagccttgcatcccagggatgaagcccacttgatcatggtggataagctttttgatgtgctgctggattcggtttgccagtattttattgagtatttttacatcaatgttcatcaaggatattggtctaaaattctcttttttggttgtgtctctgccaggctttggtatcaggatgatgctggcctcatcaaatgagttagggagtattccctctttttctattgattggaataatttcagaaggaatggtaccagctcctctttgtacctctggtagaatttggctgtgaatccatctggtcctggactctttttggttggtaagctattgattattgcctcaatttcagatcctgttatttgtctattcagagattcaacttcttcctggtttagtcttgggagggtgtatgtgtcgaggaatttatccatttcttctagattttctagtttatttgcaaagaggtgtttatagtattctctgatggtagtttgtatttctgtgggatcggtggtgatatcccctttatcattttttactgcgtctgtttgattcttctctcttttcttctttgttagtcttgctagcggtctatcaattttgttgatcttttcaaaaaaccagctcctggattcattaattttttgaagggttttttgtgtttctgtttccttcagttctgctctgatcttagttatttcttgccttctgctagcttttgaatgtgtttgctcttgcttctctagttcttttagttgtgatgttagggtgtcaattttggatctttcctgctttctcttgtgggcatttagtgctataaatttccctctacacactgctttgaatgtgtcccagagattctggtatgttgtgtctttgttcttgctggtttcaaagaacatctttatttctgccttcatttcattatttacccagtagtcattcaggagcaggttgttcagtttccatgtagttgagcggttttgagtgagtttcttaatcctgagttctagtttgattgcactgtggtctgagagacagtttgttataatttctgttcttttacatttgctgaggagtgctttactgccaactatgtggtcaattttggaataggtgtggtgtggtgctgaaaagaatgtatattctgttgatttggggtggagagttctgtagatgtctgttaggtctgcttggtgcagagctgaggtcaattcctcggtatccttgttgactttctgtctcactgatctgtctaatgttgacagtggggtgttaaagtctcccattattattgtgtgggagtctaagtctctttgtaggtcactaaggacttgctttatgaatctgggtgctcctgtattgggtgcatatatatttaggatagttagctcttcttgttgaattgatccctttaccattatgtaatggccttctttgtctcttttgatctttgttggttgaaagtctgtttcatcagagactaggattgcaacccctgcctttttttgttttccatttgcttggtagatcttcctccatccctttattttgagcctatgtgtgtctctgcacgtgagatgggtttcctgaatacagcacactgatgggtcttgactctttatccaatttgccagtctgtgtcttttaattggagcatttagcccatttacatttaatttaatattgttatgtgtgaatttgatcctgtcattatgatgttagctggttattttgctggttagttgatgcagtttcttcctagcttggatggtctttacaatttggcatgtttttgcagtggctggtactggttgttcctttccatgtttggtgcttccttcaggagctcttgtagggcaggcctggtggtgacaaaatctctcagcatttgcttgtctgtaaaggactttatttctccttcacttatgaagcttagtttggctggatatgaaattctgcattgaaaattctttcctttcagaatgttgaatattggcccccactctcttctggcttgtagagtttctgccaagagatcagctcttagtctgataggcttccctttgtgggtaacccgacctttctctctggctgcccttaacatttttcccttcatttcaactttggtgaatctgacaattatgtgtcttggaattgcttttctcaaggagtatctttgtggcgttctctgtattttctgaatttcagtgttggcctgccttgctagaatgggggacttctcctggataatatcctgcagagtgttttccaacttggttccattctccctgtcactttcaggtacaccaatcagacgtagatttggtcttttcacatagtcccatatttcttggaggctttgtttgttgctttttattcttttttctgtaaacttctcttctcacttcatttcattcatttcatcttccatcactgatacccttttttccagttggtcacatcggctactgaggcttctgcattcatcacgtagctcttttgccttggttttcagctccatcaggtccttttaggacttctttgcattggttattctagttatccattcgtctatttttttttcaaagcttttaacttctttgccattggtttgaatttcctcctgtagctcagagtagtttgatcgtctgaagccttcttctctcaactcatcaaagtcattctccatccagctttgttccattgctggtgaggagctgcgttcctttgcaggaggagaggcactctcatttttagagtttccagtttttctgctctgtttttttcccatctttgtgtttttatctacctttggtctttgatgatggtgacgtacagatgggtttttggtgtggatgtcctttctgtttgttagttttccttctaacagacaggaccctcagctgcaggtctgttggagtttgctagaggtccactccagacgctgtttgcctgggtatcagcagcggtggctacagagcagtggatattggtgaaccgcaaatgctgctgcctgattgttcctctggaagttttgtgtcagaggagtacctggctgtgtgaggtgtcagtctgcccctactggggggtgcctcccagttgggctactcgggggtcagggacccacttgaggaggcagtctgcccgttctcagatctgaagctgtgtgctgggagaaccactcctctcttcaaagctgtcagagagggacatttaagtctgcagaggtaactgctgtctttttgtttgtctgtgccctgcccccagaagtggagcctacagaggcaggcaggcctccttgagctgtggtgggctccacccagttcgagcttcccggccgctttgtttacctaatcaaacaactaactcggcaatggtgggcacccctccccaagcctcgctgccgccttgcagtttgatctcagactgctgtgccagcaatgagcgagagtccatgggcataggaccctctgagccatgtgtgggatataatctcctggtgtgccgttttttaagcccgttggaaaagcgcagtattagggtgggagtgacccgattttccgggtgccgtctgtcaccctttctttgactaggaaagggaattccctgaccccttgcacttcccgggtgaggtgatgccttgccctgcttcggctcacgcatgttgcgctgcacccactgtcctgtacctactgtctggcactccccagtgagatgaacccggtacctcagttggaaatgcagaaatcacccgtattctgtgtcgctcacgctgggagctgtagactggagctgttcctattcggccatcttggctcctccccttatttatttttttcttacataacaagaatgccagtggttggccctgcaggcttggtgtcatggcccccaaggtaccactggagactctggttctttgtgtctttgtgtcccaccaaccttagtgtgtggctttcatccttatggtcacaggatgactcctaaaactctgtacagtgaatcagtattggagacaggaagaagaaaggaggtaaaaaagacatgccagctaactttgctcccattaggaagctcttctagaagctcacagaattacatttgtttatgtatttcattattcagagctgcgttagctttgtctacaagggagattggcaaatgtagttttcattagcccagcacattgtcacccccaacaaaactagggttgagttagaatgaaggggctagtgcatattgataggccactagtagtttctacacagcctccaacaattgctgtggatgtagattagtaacagaacttccactatggcatcatagcacctctatcccactagtacctgtagtaggtccaaatcatctaattccaggagcctggcttaaagaagaggaatattgaggcttctaggtccagtattaatcaaggtaagctagctgtgagaacaaacaatctcaaaatctcagtgaacgaaaccaacaaaaacttgtttcatgtttatatcacagtctgatgcagatcgagtggttctcctccaagcagtgactcagggacccaggctgcttccatcttacagctctaccatcttgtgactttcagattatgttggcatcattcagccagtgactaggaagaagagagaatgaaagattgtgcacccaattcttaaatacctccactcaacactgggacacatagcttctactcacacttccctggggaggactgcttacaagattcatcaatctgcaaggagggctgggggaatatattatagttcttgcctggcggcacttccagcaggaacacttcactatgaaaagggagcacaagtctttggggggacagctagccttctgtgccacaaaagcccagtcacaaagaaaaagccattaccaaaatgttccataaacaatgtagacctactgtggtttgctgttgtctgatagataaaaactgtgttgttttagtcacaaggatttggatgtgggagctgcaaggaaagcaaaagccaaacaagtacagctgaagcacctgagatcctaggaggagacaagaagaatacaaggtgccattgtcctatcagccaggcagaaagatggtaggaaacaaggccatttaaaatctaattgcaattgcaagggctgggtgctgtggcttacgcctgtaatcccagcactttgggaggctgaggcaggtggatcacttcagctcaggagttcaagaccagcctgggcaaagtggtgaaacctagtctctacaaaaaatacaaaaattagccaggcatggtggcatgcgcctgtagtcccagttactcaggaggccaagatggaaggatcaattgagcctgggaggttgaggcttcagtgagctgtgattgtaccactgcactccagtctgggtgacagagcaagaccctgtctcagaaaaaataataataaaataaaatctaattgcaggcaaggccacaggaagtggcaagtgcaactaaagacttcctagaaatcccacacattgataagcagccgggttgttcagccagtttttttttctgagaacaaccaattttaaaatattttaggaaaaaccacaatattgagatatttttaaacagcttatatttaaacagcatatatttaaacaaagtgattaatttagaattcatattttatttgagaaaaaaacaagatgttcctggtctggcagatgacattctaaattattcactcccacttgtggaatagctgagttatagtccggcccctcctctgtagaggaggatttataggagaagatgagtcacgttactttttgtgactatttttctttgcatttgttgactcctcttgttttattcaccttctaatcattgaataatctgtacaatcagactgccttattcatgttggcagttgttttaataataacaatgcacagagccattgctactaacagaaagcagggcagacctttgagtctgagtttggggatacaagtttgattccatcccagctccactgattcccagcgagatgtggttcaacatcataggaccaaatgaaataaaaagcgtgaaaatgctacacaaatcaaagagtgctaaagacatattaatgaaacatctgtaaaatgggaataagtaccacgtttctgaggtagcatgtaatacaactggcacagggttccacacttggtagatactcaaaaaagaaaataaaaagttaacatggacaaagtaaaataaactggaaataggagatggagaaatgttaaaacaacaggcaccataataatgtaaagtaggatttcagctcatttacaagcacagaggttatatggtaagtcctcacttaatgttgtcagtaagttcttggaaacagtgtctttatgtaaaacaacataaaggaaaaccaattttgccataggctaatggatataaacaagagttaagttccagtacatatgtgatggcatatttccagttacaaaatatcaccaaacttctaaataaagaccaaaagactcctaatattaaacattgaaataaatgtgagctatactttcatataagaaaaattaatgcaaacaagtacaataattatttactgagttattccagttcggggtcgtggatggccagagtctatcccagccgtccagggccaagtttggaacccaccctggccaggacgccatcctatcacagcttgcactcacacacactctcactgggaccatttagacacaccgattcacctactctgtgcatgtttgggatgtcaaggaaaccggagtaccctgagaaagcccacatgggggaacatgcacactccacacagacggtggctccagccaggaattgatttattttctcatcaatgttataactaaatgactttgaatgaaacaatgttatttgataacctgctgtatttagagttcacaaaatttatccctctgaaacacatacacacacgcatggccgcacacacacgtgcatgcacacactgcacacacttaatgctaaacttgaaagagatttaaaggctaaaaggaaagttggactttaaatttcccctggagctcacattttctgggtactgaaagatatggtagatacatatgattgccttttccaaaaataacttctatggaaaatcctgagagttataagagactacaaaggtgatttgatagagccacttaagtaatgtatgcaatatgatcaccaggtatacttgtatgagagatgggaaagaaaggaaatattgaaagagcagaaccatgaaggagaagaagcaattgatcctgaagaatagcaactgtagtcagggattagagacctgcaaacaagtttcctattcttttcaaaaatgaagaatagcttcttattacaaaagctgtatatataaattatagaaaagtcagaagtgcaggtaagcaaatactttaaaaatcaaaattatctctaattctttgacttattaatcattttaacagcttgattgatattttttcagatacacacatacatacatacttctacaaaactggaagtatgcttatatattgtatcataacctgcttttttatttaaaaaatatcatgaacaacttttcatgtcattaaatattgttgcattacatttctaatgaatgcataacattccattgtaaggatacagcgtaatttaactcagtctgtattgagctacattgatttccagttattcacattagaaacagtacaccactgaataaatttatgcattcatctttgcttacctctttaatgattcttcacgataaatgctagaaatagaaccacagacttaaaggtctccattgatatgtgtggctcccttgttttcctttgcaaggttttgtgtggcatctgcctttaaaaggttaaagatatttttacttataacatccctgaactttacctcaagtcttggggaaagttattgaaaagtagtttgtattcaaataagtacaaactggcaaggtcaatcttttatacaggttatcagaaacaaatcaacctcataagatggaactaaacccattattatgattgagtcagcaaacttaaagatgtgtttggtttggacaaatactattaattccttaagttccctgtggccacagtttttttttttaatgaatgtttttctgagtaatcttggtcctatttgaggccatcttcatatgcactaccaatatttccagctatacccaacaggtaaactagccctctgtaggcaattaaatgtatattttcctgaagaaagtaaggttatatagaatataagtataaggtcacctagaagagctattaatgtattatggacaatttctttttattgccagagctacatgttacttatatttaagtctgatatttaattctctattatattcccttattattgaattaattaattcatccattcatatgacagatatttcttgagcacttacttgtgccaggcactgtgttagactctggggatttggaaagaccctgcttccctcatgaaacttacattccaatgatggaaacagatcatctgtaagtgcgtaaactaatatatcatgtcagataatgtctcatttccttatctcttaaataaaaaaatattctattccatagggctgttatgagaactgagtgagactatgtggaaattaccatacacatgtttaaaaaatattgtttctttttcctcttatcttttagaaaagggaaaatgattattgtttctttttcctcttatcttttagaaaagggaaaatgatttgtataaatcattaaatactcccttgatattacaaaactagcaaattgttttttgattttattttttaaattgtcacataataattgtacatattcatggtggtacatagtgatgttttggtacatataattatagtgatcagatcaggacaattagcatatccatcatctcaaactctaatcatttctttgtattgggcatgttcaatatcctccctttaagtatttgaaacgacacaatacattattgttaactacctcatcccacagtagtatagagcactagaacgtattcctcctatgtagctgtaatttcgtatcccttaacaaatctctcccatctttcccttccccctacccttcctggcctccagtaaactctgttctactttttacttctatgagatcgaagttttttagcttctgcatgtgagtgagaatgtgaagtgtttaactttctgttcctggcttatttcacttggtgtaatgtcctccatttccatccatattgctgcaaataacaggatttcattttttaatggataccattccagtgtgtatctatcccacattttctttatccattcatttattgtcagacacgtaagttgattccatatcttggctattgtgaaaatgctgcaggaaacatgggggcgcagatgtctcttcaatataataatcttttcctttggataaattcccaggagtgggattgctagatcatatggtagttctaattagcaaattctatattccatattaaaggaaggaataggtaaatttttttcaaattttttattttgttaaagatggagtaatcctcccacttcagcctcctgagtagctaggattacagaggtgagccacagcacctggcatgggataggtaaacattttttaaaatgtttgttttgtttcaggcaaaattaggtatcaactgtttctccacaaagaagagcagcttaagccttcacagcacatagttctgataattcaggtcttcttttgccatttctcaaacatagctatcttgtgttggtacatgcgatctgcagggccttagacgaatcatacatttcatctctctgggcctcagtttcctgaagatgaagttatgttatatggttcgtaaagttcatttcagggctaacttcactttgtccttgtaaaaattatctgcctagtgggtccactccccacctcaccaccccccaaaaaatgactgctgtgctccaacccaagccaatcaaaaatgataaacacttgactgtgacttttttcaagactctgttttacagagaagtggaaaggtctactgtggaatgcttatattttaatttgtcctcattgataggagaggacaaatgtaaactaggagaaatggaaaaaccagtgatacatgtcttgttatgttaaaggaaaaagctagagacaatatgattattaataattattttttaaaattaattcttgcatttattgagcacctgctgtatccctcatatgcattaccttgtataagtcttgtaatagcccaaaaagttaagagtgttcttattctcccaaggatgcagatatggaaactgaaactgagtacggttatgcagtatgtgaggggcaatgctgccacagaaactcaagtctagctgagaccaaacccatgtttttaaccacttgcttcttgcctttgccaatcattgccaccaacgagtcaaaacttacttgttgctggaacatggtttcatcctggccttccacggaatctgttgagcttgttttttttttttttccatatgccataatatgtttagtttcacctcagatgagacagaggatttactttcaagaaagttggacgctgtccactctaaacagtaccagaggtagccttacagcatcagaaaatcctgtggtagtatctcttcatcggaacttggaatatgattttaagagttttttctatcttttcattagagcaggccaacactgacttgatttttctctgaaattagctgtggacaaagattccttttcaaactaaagattctaagcttattttcccccatcactttatcaaaactagaaacaatccattaaaaacactgcccagccttcaggggcttaatcaactcagtggtataaagcatgaaacttgattctgagatccaggagagaatatttggattgccgggaggtgacctttatatgtttctttacgtgtataacaaatacatttcaattcgcgtctagccccttaaaaccagtgcatgtttctgaccctgagtgctactgacattgtgaatcgcactgcaaacagaacacgggtcactgttgttttcctgatctgggaagacatcatggtgtggtgaaagggacagtgcgctgctgatcagacttgggttctgtctctcctctgctaccagtgaaatgaatttcagatgcaaagtggaaagatcaattgtttcttggcctctttgctgagatcaagggaagaagaaagatcagattagttccgtgacagtccaatatttactgactgacccatgttctgtttcatctcaggatttccagggggctccaatttggaccactgcagcggtcccaactgccaacctatgttttcccttcttccctacctttcccctgcagcctcaagtggttccagataaagtgttattccatgtatctcactgtctgaatctagaggactctgatacccaaatgtgtttctcagagtgtgtcaatgaaagggactctttgacccacaatccccctttttcttcacaactccatcatcggcatcctcaaagacaatccatggtgcctactactcctcatcttattgacatgattttaatgtcagctctcgccgggcgcggtggctcatgcctgtaatcccagcactttgggaggccgaggcgggcagatcacgaggtcaggagatcgagaccatcctggctaacatggtgaaaccccgtctctactaaaaatacaaaaaaaaatttagccgggcgtggcggcgaccgcttgtagtcccagctactctggaggctgaggcaggagaatggcgtgaacccgggaggtggagcttgcagtgagcagagatcgcgccactgcactccagcctgggtgacagagccagactccgtctgaaaaaaaaaaaaaaaaaaaaaattttagctctcaaagttttcctccatgttccatgaaaatacactttacaatctagtattccccccaccacacacacacacacacgcacacacatatatactgaaacgaaaccatatccaacttcatttccatttccaattcattcaacattttctattctgttctattgcatttaaaaaacgctggtcacaagccactaaactgatctcagatcagactttaataaatcagactcccccttttatacgcacagagcactctctactgtttcttcctagtacttgtcacaatttgtaagtcctaaatcatgtgattgcctacttaatgtctcccgcaacctgcccctggtgttctgtaaacttcaagaggatatgttttgctcacctttgaatttttagatcccatacaacacctatcatatcataaatgtttaataaatatttattaaaagaattaataaatgaatgtggccaaacctattcaggtctgcatggttcctccctagagttccatcacacttcacagatctaaagtttcctcccagttgtggaggtttgaagctcaaaactgctggaggtgcttcccaccatagctcgtgaaggccctattggtgttttcttcctagtccgtctctagttgatcatgacagatgggccagtgtgttttgaagaagactggctgatgcctcaccaaattctggggacaggtgcctttctccaggggaattcatgaagagactctccaggggcagggcagaccactgggaaaaacaagacccttgggttttctgaccactggccacttgtttttcccacatcaggagagtttatcatctgtgctcatccacctcctgaggttgctttgctggtgctgatttcaggtcccaggcccctaaggtctcacactcactccacaagccacctacacagctgtagttgttttcagccgacagctaggttattttgccttccaagatattttcttttatttatttattcatttatttattttttgagatgaagtctcacactgtcacccaggctggagtgcagtggcacaatctcagctcactgcaacctccacctcctgagttcaagtgattctcctacctcagcctccccaatagctaggattacaggcaagcaccaccatgcctggctgatttttttgtatttttttgtacagatggtgtttcaccatgttggccaggctggtctcgaactcctgacctcaggtgatctgccctcctcagcctcccaaagtgctgggattacatgcatgagccaccatgcccggccaatagtttcttttttgataggcagctcttaaagccctcagaatacatctctaatgatgaaatcatcaggcaacttgacaaagagtgaagaaattgaagggttctctcaatagcatcccaaggaggctgacccacaccctactgcctaccataggctggcttcatgtgctctagtgctgtgaataaaggaaaaaactaacatgttgaagcatttatttagtgccaggaggcaggtactttctcagataccctttttcttctcacataattccaggtcattggcagaatagagatgcaaaccaagaacttgggcagcaccaagatgtagatgctaaaactttaaacttgctggacaaaatgataggggactttgaaataattattcagacaatttaggcaagcaaacaaaagcaattaaaaattgggcatctggctgggcatggtggctcacacctgtaaccccagcactttgggaggccaaggagggtggattgcctgagctcaggagttctagaccaacctgggcaacatggtgaaacctagtctctactaaaaatacaaaaaattggccaggcatagtggcgtacctgtagttccagctacttgggaggctaaggtgggaggattgcttgagcctgggagatggagcttgcagtgacctgagactgtgccactgcactccatcctaggtgacagagtgacacccatctcagaaaaaaaaaatgggcatctggccaggtgtggttgctcatgcctataatcccaacactggaaggccaagtctggacaattctttgaagccaggagtttgagaccagcctgggcaacatagcgtgaccccatctctacaaaaaaattaaaattaaaattaaaaacagccagacatggttgtgagcacctgtagtcccacctactagagaggctaaggcaggaggatcatcaaaactgcagtgagctaagatcgcaccactgcactccagtctgggtgacagagtgagaccctgtctcaggaaaaaaggaggcatccaaaaaaatgttcccttagatccattttttgtctgacagagacaggagaggtgatgaaagggaatgtaagagtatttaagggattatttctttatggtagcagaaggacaaagacatgtttgaaaaatttttaatattgtataaaatgatgatattttcttagtggtcttgttgttgaatccagagattgtggtcatgtagttcataggtaatttatcagttattatttattttttaaagcttttatttatttatttatttattttagagatgaagtcttgcaatgttgcccaggctggcctagaattcccgggctcaactgatcctcctttctcagcctccctagtagctgggactataggcacacaccactgtgcctgtctaatttgtcaacttttaaatgagatcatctgcaagttcaaggaagttagataaagggtgataccacagaaaaaaaatgagatttttctctttaagatgaatattgaatttagaattccttaattaatattgaggatcacatgcgagctacagatagggaatattgagtatttaaagcattctgaatgacctgagtgttttccttctcatgcttattaaaaacatttaccacttacagctgaattggaatatagttctacataaattgttatttacacctgatacacagaaagaaatgtgtttccttatttatcatactattaatttgaatgtgctattctttttttaattgctttaaagtcaattggggaatcagattatgaatatctattttactgcttccacatttcctaagttaatcaaatacgacaagttagtgagcttgtggaatttacttgaatttcctaatcttttaactgagagggtattttcgacagcaaatattttgtagcatccatttgtcattttttaaatattcaaactagttttttttaaaataatgccaagtacacttagtgcctagtaaatgctggccactgttattgctgttatcattattcttttttgtttgtttgtttgagagggagtctcgctctgtcgcccaggctgaagtgcagtgacgtgatctcggctcactgcaagctccgcctcccgggttcacgcccttctccggcctcagcctcccgagtagctgggaatacaggcacccaccaccacgcccggctaattttttgtatttttttttagtagagacggggtttcatcgtgttagccaggatggtctcaatctcctgacctcgtgatccaccctcctcggcctcccaaagtgctgggattatggcagagaaatgtttgtttcaaaagtgtgttagtctctaaggaaatgaatacttccagactaaattctgtttatagtattatcattaataaataaactaaaacattacttctgtttcattgccccaatgtatattgtattaaaatgttcttttctgatcttctctaagttaaaaaaaaaaaaaagaaacaaagttgagtaaacaagctgagcaaactttgtgttgaaactttaatatgtccgaggaaaagaatcttgcattaagtccaatacagagagtctgataatttggtggagcagagagcctcatctgaggtggctttccgtgaacagcatctctgaggtgtcacctgctaccacattcactgtccaccctgggctttgcccctcaagcaccagggctcaggtctcttgttttgcctgtttctccctatagtctccctggcctgtgccttttagacaaaacagattaacatcacctttaagccgtcaatactgaacattctgtctttataaggcctgactcattaccaattttatttggtcaattttaccttccttgctttcaaaggaacaccatttgcctatgtcaagtgttctctttcttttatttttcccttccttctgtctttcccctccttccttccttccttcctccctccctcctctctcctctctttcttccttccttgcctccttccatccttccctccctctctctctttctttctttctttctctctctctctctttctttctttctctctctctgtctttctttctctctttctttctttccatcttcttttctttctatctttcttacttttgatgtagctgtcacgacctaatgaaaatactggcatgagtgatgccacctttagattctccaccttcctgttcctgtcctattcaccaacatgaattggtttgtggctgtaagtacttggtgggttattgctcatagattcagttgcatttttgctgagatagtgctgttaccaaaagcaggggtgctgcttgaagaagtaaacctaactctgaaaaatagagactctccagaaacatcataatcttaaggatggacatttgtggcctgttattgttacttcattctaggtgacagagtgaagtgagtgagggcaaaaatgactgcacacttatggaaagagggctgcctccaccacagacaggtagtgggaggtcccactcttccaggttgaacccaatatcctatcttctccttccgctcttggtacctgttgttgctattgtaaacacttccctcacctgggactgcatatagatgaaagattgctggggggtttcccaggatcttgggccagtgccaacaaatggcaaactttcaagtctagagatggtcctatggcatgactgggggacaccacttccttcaccagaacattcacatccttcccaaggtgccacgcccagttcttttgtccaacaataaactctgcgaagtggagtgaagtcaccacccaagccttagcctacctctgaccacagcctgtgactccacaaagataaatgaaaagaggaaagtcagtgatgttttctatactgtcagcagcaatctcacagcctcaatacattttctttcaaaagtttaatatgtaataactggcatttcttcttcattcctagttggttagactgcatcacatctgccatgccaaactattaagagtaatacaattcttactcttagtttattaagagtaaaaactattactcttaatagtttagcatgctattactcttttcttattttttaatttttttaattttttattttttgagacggagtctcgccctgttgcccaggctggagtggtgcagtggcacaatcttggctcactgcaacctctgcctcccaggttcaagcgattctcctgcctcagcctgccaagtaactgggattacaggtgcccaccaccatgcctggctaatttttttttttttttgtatttttagtgggcaaggggtttcaccatgttggtcaggttggtctcgaactcctgacctcaagcgacgcccccgcctcggcatcccaaagtgctgggattacaggcgtgaactgctgcacctggctgacgtgctattactcttacagcatctggacaatccctaacagtctgaaagctctataatgttgcaggtagtccaaaggccctatcccttattctagaacacaggctttatagcacaggctttggcaagtctgtaacagtctgaactcctccactgtattccacatactagggatcttttaagttgtcattatgtcctggcacaagcatttatcatatttctgggagcatgtagggttcaagatgcgagggcaagagagggctgagttgtttgttattaagctgacaggaaatggccaaggctcatgtgctactgcttgcagttgggcaaaagaggataaattaattgctttgtagaaattcctttctgcattctttagggaaaatttttccatgtgagctaaatgagtcaaagggggtggttttgggctcaacagctttgacattgtcccttcaaggaatgaaacaattaaagaaactgatctcctctgagaaaaagaccatttacaataacctatctactctacataaaatattcccagtagactcatcaaaacaagaccctctgataccacaccatactgggtttttccttattgggattcccccatgttttttctttaatgcttccccatgttttagaaacagatttgcttacccggaaccttccacactcaattccaaatttatcatagtactatcatttgggagtaaacaacatgtaaggggcctacacgggtggaaagcccattcaagaaactgaggatgatcaaatagtagagttgatagtatgtgtataatcccagggaggagtttcatgacggattagaaggtcaacactgcctgatgcagccgaaagatcacattaaaacaggacaggaaggaagtcctggctgtccagcaaaaggtctttagtggctatatcaagagaagcttttacagaagggtgagggtggtagcctgcgaacattggattaggagtgagagggactgaaggaagtagaaactcgagctcaggggaaggggagagaatgagcttgaggaaggccctctgatgaagggaaggctcttttctgatgccagtgagttgagcagacttataggaagcaaagaggagtctagggacagacagggattgtccaggtaatgtaggaaacatttgacaaggacagatctcgaataaaaacatgaatgcaatttctgtttcagatgtctcctttgcctgccccatcccacattctagaaaaatatttggtgcattaacagattttggacttcacagggcttcacttttattgtgcttaatatttgttccttggtgaaacacaaagagacaaactacacaaaaagagaatcatacttgatgaaaaaaatcaatgtttagaagttgctcttaaatcttttacccattgctaacatgggtatttggatgccatttggaacgtattccaggactacttatccatgaaaggattaatgatattggagccaggttcaaagtctcagcaacaagctaaaacctgctctttttagtagtcaggggcaaagcttagtatcctttcttctgaaagctttcgcatgctaagctttccattgccaagcccccgggaaggaaaataccagaagtttcactccgatagcagctttttctgagatgcgcctggtgataacattttccagtagggctatcttctgtctccttccttctctgtgtgtaccagtaaagccttgtacaagtctcttaacctttcttggcttcagtttccaaatttgtaaagtgaagataataatacctccctcatagagttgttgtgaggactacatgggctaacgatcagacagaaagcactcattaagtgtgactagcattgttaattgcagtaatagtagttctagtagcaggcttttccaggttataaggattaaagatacgctcatgttacctaagttaatggtgcattattttaagggtacaccaaaaagtaagaagaatgggaaactacttaaccagcacatggggtgcagaagcgagagcaattgtgttttctttttttttttttttttttgagatggagtcttgctctgttgcccaggatggagtgcagtggtgagatctcggctcactgcaacctctgccacctgggttcaagtgattctcctgcctcagcctcctgagtagctggggctacaggcatatgccaccatgcccggctaatttttgtacttttaacatagacgggggtctcaccatgttggtcaggttggtctcgaactcctgacctcatgattcactggcctcggcctcccaaagtgctgggattacaagcgtgagccaccgtgcccagccccaagggaattcttacagcctgacaggtttggaactctgagtctctctgtgtgtctgtgtctctgtcactccaccatatgtttagcagggttaattaatttgcccaagatcacacaattagtagatgattatgcaagatttgaaccagttgttattcattggaatatgattactgtgtaagttagcatgagaatattgaaaataaatgtcttgttagattcatttattttttaaaaaattcctatgtaggtcgggcacagtggctcacccctgtaatcccagcactttgggaggccgaggcgggcagatcacctgaggtcaggagttcaagagcagcctggccaacatggtgaaaccccatctctactaaaaatacaaaaaattagccgggcctggtgatgcatgcctgtagccccagctacttggtaggctgaggcaggagaattgcttgaacccgggaggtcgcagtgagccgagatcacaccactgcactccagcctgggcaacagagcaagactccatctcaaaaaaaaaaaaagtcctatgtatacttcttcacatcaatttaggcaggctttatttgttaacttttgttggtagccaacatgcatttaaactacttattattgtcctaatctaagaaaaactgagaaatggatgaagttggtcctagggtatcccaaagcacagagtgttttattctgtccttgggacagaggtttgattcaaaatgttttttcggaaactagccttgaacacctaattttattaatattctttttacactccatccctcctggaaaaggactggaccccaattcccaccattgcttttttgggacccattatcttccttagcttcctatgcatctacagggtagtctgggcttcacttcctcagtgtccctgtatgaaattaggtggatatagattagtctgatgtaggaatatcacactgtactaaggtttagtttgtatgttattctctcaagtaactgatctttcaatcgaactaaacacttcctatgtgctttaaggtggtgggaattacaagcatagcaagttatgattggtcacggatttctttcctctttaaatggtgacctactgcccattgtacctactcaaagcaactttctttaggaaaaaagaccacagtctactttcctaagcataaactcagttctcattccacctctaccacctgcaagatttgttaggcttaagcagtcccttaacttctttgagtgtttgttgccttgcctacttcattggaagtaaggctctggaacagggaaggtttgcctccataagactaaaagttatgctaatataagagactagcaaaatgggagacatattcagctctcttcttgtggggaataccttgcccttgaccaaaagccttgtcccagaaagagccgtgtgggtgttggctttgtgcccaacatgtggctcctctgccatgattgatggcttcatttaagaaacaggttttaggattttttcccctaaaatcttattcctgttaattatcatggatcaactttaccttagctcgtttaatacacagtcacctggtataaaagcatgtgaaaacccccagggatcgtaaccacatttatgcattgagaaaagagagtgaggccaagattttgagatgtgttcaaatgcaagaagcttttaaaatgcaaagtattctaaaactgttgaaagttgaagctaactgttgttcccttgttgaaggtaaaaagtaaagcatttttaggaaagcacttttccttatgtgtctaatatttgggaactgcataggagaacagtttaataggaaccctgatattgacagtaagatatattcttaatgtagtaaccagacccagggcagaatttgcaaacccatggtaggcatacaggtggctgaagaagaatcgggacagcaagatctcactgagatgcaattccattcctccatttgatacagattaagatttctgaaaaagaccatcctcctaaaccctcatggactctgcagataatatgaggccagaaaatgaataattcccaactcttgctatctcgttactggccagtgtgtctggcttcgctgagtgtgtgccttctgaagcgtaccctataattattcagcaggtatagtccagttcgtcctacttactttagcaagattacctttcttttatttttcctgtgaaaatccttctcttccttctttcctcctttgtctttcctctttgttaactttttaaatctaaagtgccttgaaaaacttgtttacatagtagtaagaaggaaaatgttgacttgtgctatcctgggaaccttgaccttcctgcattatggataaatcatttccctgcaggtggaagtggaaaattgcagatagaaccacattgactcacattctccttctacttccatttgagtgagcaccaagtatgcatcacgacttgagattataaagttggcttaatgatgagacaggtttctcagtcgggttttccattggctcgaagttcacaaggcagttgttgcttgtctcagagtgtccttaggtggactacatctgaacccttggcgttattataatgcagattctagctgtgctcaaaccaatgaatcagaatctcaggagggtggcgctcagaaatctgcatggttgatcagttctttagcagattcttatttttgtatgctaaagtttgagggtcaccactggagagattccagaacagggcctgcaagggaattgttcaaagtttgctcaagttaactttgttgttacagcattagcttgaatatcaggaggttttgtatttaagttctctaaaaaaagaaaaagaaaaaaagagaacagtctcaatatataaaaggaaaggttttcatatatgtgcccaattataagtatcttgagtattctaggagtctaaacagaatgtctttagatcatccttataacgatcctgagactcttttgactgttttgagttgaagacaggtaataagaaagaaatcaccaattaatgcagaaggaaataaatttctgtatataataatattcacatttgccatgtctcttttaaaaagtccaaataacaggcagagcgcggtggctcatgcctgtaatcccagcactttgggaggccaaggcgggcagatcacctgaggtcaggagtttgagatcagcctggccaacatggtgaaaccccatctctactaaaaatacaaaaattagccaggcgtggtggcacttgcctgttgtcccagctactcgagaggctaaggcagtattatcacttgaacccaggaggtggaggttgcagtgagccgagatcgcgccactgcactccagcctgggggatagagcaagactccatctccaaaaaaaaaaaaaaaaaaaaaaaaacagctcaaataactttaccgtacataactttaccatacatgtcctctagtctcttatcatttcttcatatgaagaataatttatactcattgatgtaaattttgctatattttatacaacaaacatagtattattttaatattgcacatagagaaaaatacctcttcccctcaaaattagaagggttggtatttttattcaggcttattgatttaaaatacctgcttgatccgtaattcaggccatacgatttcaccaaaacaaatatcctaatagttgtcatcttgaataactgtttagtgcacagaatgtagtctcatttattaagaagtgatttaagagattattacttctgcatctatcacactaacatgaccaactctttagtaagggaagagtaagggaacttattttatatctagatagaaattttattaaggatacagtattaggattcataggggaaatagtggatagatcacaagaacgaggctctttctgagccctgcaggaaagaatatttgcagaacaataaaggacatggtggcttcctggagaatgttggccgaagactgagccttacttctggaaaaggctcagtgctagagccaagtgagcatcgatatgccaatacaggcaagaaaatcctgcaagaggcagacttggttcttaggtcggaacaggctctgcttcagaacttgatccggtacccaattcgtttctgcttcagcttctttttctataaaatgagggtagtacttatcccatgagggagctgttatgaggataaatttggctttattgaatgtgcatgattcctggaacccataaagatgtcaaatttagaagcctcagagagatttcctttgctctgtgaataactaaatttggttagctggggtggggtctgggtacttttccttgtgaagaatttttccctcattctggtcatctcctcccctcctatagaggcaccatatatttttcttgtctcaggtacctatagtgataaaacaccctgagctgaaaggatcgctggatagggcagtctcaatacaaaagaatgtggcagaagctcaggcttcagtgcacatcagaatagaagcttcatgagggcagaggcttttgtctgctttcctcattgcagtatccccagaactttgagcaagtgcacactcgatgaatacttgaaagaataaatcaatgtcagacatctgggcttatgtctcatctttctactgttctcaactaagagattctcgtcattctacaactttcctgagcctgctctccttctccaaatattcacccttccaggcactgactccacctcccacatcagagctttttcttaaagtaaataacagtcaacaattaatagcttcataactttggaacagtgcagtgtctttggtttaagaagcattgtttccatcctccaaactaaaataaattttgagaaaagatggagatggtttgggactggggaagaagggaatggaagaagtgattatttgagggcacattaactatttgtacaaagtagaatatcttagttaaatttggctacatagcaagcaggtatcattaaatggatgtctgttagaatcttgattttcaaattaactagatagtcagcgttagttagactgagggagggtgattacagtcctatgtcactgagggagaatggtgaaagggcaagagaaggctggcaggtagagctggaatttttctgccagcaatagaccagtggttcccaaatgtaagcctgcaacagaatcatctggagggcttgttttttgtttgttgttgttgtttgtttgtttttggttttgtttttttgagacagagtctcactctgtcgacaggctggagtgcagtggcgcgatctcggctcactgcaccctcagccttccaggttcaagcgattctcctgcctcagcctcctgagtagctgggattacaggcatgtgccaccagcccagctaatttttgtatttttcgtagagacggggtttcaccatgttggccaggatggtcttgatcccttgacctcatgatctgcccacctcggcctcctaaagttctgggattacaggcgtgagccaccgcgcccagccaggagggcttgtgaaaacacagatagctgggcccatccctagagtttaggattcagtaggtctggcggaggcctgatagtctgcatttctagcttggccaggggatgttgatgttgctggtcccaggaccacattttgagaaccactgcaatagagagtgtgcatgaaaatacaacaacaattacctgatggtccttagcttagttcagttgtcccccacaggttgaagcagtgttcaagggcaaacaaaaactttctctctcagccacctccataagttccatagtttatttaacaaagcaaactcacaaagaaggaggaagttaggactgctccatttccccttatagcaaaggcatgtgtatttcacaactgcaatcagcttgaatagcagaggctggaaggctctccatgtctttactgaagtcacgtcactaagtcacacagacatgctgctaattcactgccttggccagcacatctgaaaataaatagcaccattataggccctttcatgaatatacagcatgtggcctctaaattggccaaggagctggctatgctgggacaaataacttagataaatcacaaatcagagtggagaaatgaggtgtttttaatcaacagcatccaacaatgtgtgttgagtttaactgaatccaggtagaggagggagtgggtgcaagagctcaaagtatgctgagaatagttttatttcaaaattccaggagacttagaaacaacatggtaatgatgaaaggagcctgaagagactctttttttttttttttttttttttgagatggagtcttgctctgttgcccaggctggggtacagtgtcacgatctcggcatactgcaacctctgcctcccgggttcaagcaattctcctgcctcagcctcccgagtatctgggattacagacatgtgccaccatgcccggataatttttgtatttttagtagagatggggtttcaccacgttggccaggctggtctcgaactcctgacctcaggtgatctgcccgccttggcctcccaaagtgttgggattacgggcgtgagccaccatatctggccctgaagagactcttaagatactttcataatagtttaaaaagctgtatgtgtgtttacaatttctgtcataaatctatggtaaccacagcacaaacattttagaaaaagaaaaaaaaaaacaactctcggttgagtgtggtggttcatgcctataatcccagcaatttgggaggctgaggcaggaggatcacctgcatccaggaatttgagaccagcttgggcaacatagcatgacccatctcgacataaaattaaaaattaggtatggtggtacatgcctgtagtcctggctactctcaggggactgaggtaggaggatctcgtaagtcctggagtttgaggctgcagtgagctgtgatctcgccactgcactcagcctgggtgacagagcaagaccctgtctcaaaaaagaaaaaaaattctattttcccacctctctaacataactgtgaatagtagtatttccttctagtttttaagtacactatttaaaaacatggaaggttttcaaataatgtacttagatttaaatgcatttttaagcttatacccatataataagcatagtaactaacagaatgttctttggagtcagatagtcttgggttcaaatcctccagacatttccagccctgagttttgcatttgttaaatagggatgataaacctggttcatagcattgctgtgtggattcactgaggtgctcatcaagtgctcagcacagagccctgtgtcatgtaagcactcagtaaatagtggcatcattttctgttttcacacacaaaaaatgagtcgaccttctgcaatcctaataatcagtaagttcttcttaatggccagaagtatacctatttttagtctatgcatttggcaaaatttcattccacaaattgtttggtggtcccaggagctgctttcaagatcttctctgaccagcttgtcgagagcttttgttatctgtgttttcctcaaagattagactcatgaaagatgtgtgaaagccaaaacaaaggaatgaccactggtgctcagagtgagagagattggtttagttgtttagccaggctatgtggctttgttcccagaccacagattataaccacaccattgtgggcaccacatatagccattttggtaaactagatatgggttgctagggacatgggcaagaaaccatgggtggggaggtgtggacctctcagccctgccctctcaagcctggccaacttcacatctgcaactgggactttgtttctgttccagacctgtttatccaactgccaacttgacagccacttggagtcctcatgagaacctcaaacttagtatgcccaaatgaaattttcagctcaccagaaggtaaccatactgtcttgagtcttacagttaccctgtaaacaaagggattaactttactagatagcaacttcctgcccataaagttaagaaaagagcccctcaatgcaaatgttggttttgcttatcaaataaatggattcttggttcttcaggatagttacagataacaatgggcagaatagccagtaaattcagtaactccttaaaattgttgaaagtattttgtgcactttctttatatcgctgcttagagtgttaattggtaaaatactctgaaggactaatacacaaacactttcacccagcaattccaattctaggactttattccacagatatatttatacatgtatgagttcacatgtacagttttctgaatttttttgtgctggcagaaaactagaaacaacagaaatgaatgaaagagactagttaagaaattattgcccagttttatagtagaatacatatgcagctgtaaaaaaagaatgagggaattattatgtatttatctattaagtgaataaagcaaaatgaagatcaccagcaaacagataaagaaattgtggtattcatacagtggaatactcctccataataaaaaggaatgaacaatgggtgaacactacaacatagacgactctcaagtactgtattcccatttgtgtaaataaaaatgtgggaaagaatgtatacatgtatttgcttataaactctatatgcacagaaggaaacacaagaaattattaccccgggaggcagagcttgtagtgagcggagatcgtgccactgcactccagcctgggcgacagagcaagactccgtctcaaaaaaaaaaaaaaaaagaaattattacctagattgtctatgcagagggaactgggtacctggcagacaggagtaggagggagacattgtacaatatgcttttttatactttttatatttaaaattgcaaaatatcttacatgctcaaaataaaaatagaatagcttatataactatgtctaaatattacatgtagttttcttctctggctattttctttttggtttttatataattttttaaaatccacttacttagcccaggcacataaatggaaagaaagatatgcttaaaattatgttatttgcaaaaacaaatatttagatgttttagagctagtatgtttttgttggtttctagtttagttctacatggcatcagactagctactctatatgatttctggacctttgcaatttgttaagatttgttttatggtcggggatatggtcaatatgtaaatgtttaatgtgtgcaagaagaatgtgtactctgaagttaggcatagtgttttctgtatatgtcaattagcacaagtctgtttatcatgttcaagctctgtgtatctctgggtttttttaatctgcatgatagaacagaagtatgtttgaaacttttattgtagttgtggatgtaatatttttcctctacttttgcagttcttgctttatatattttgagcctatattacttggtacatacatatttagaattgttgtgtcttcctggtggattgccctttgattatttaggaaatgtctctctcttcggtaatgcttcttaaagtccattttgtctgatagtactatagctacctcagctttcttttggctaggtttcataactttttaaattctttcactgtcagtctttttatgtccttatatttaaaatgtgtcaaaagaaagaaggagaaagaaagaaagaaagaaagaaagaaagaaagaaagacaccgcgatttacctatgttacaaacatgtatatgtaaccctaaacctaaaataaaagttaaatataaataaataaagtgtctcttcatgaaaactttcttagcatcattagtcattagggaaatgcaaattaaaaacacaatgagataccaccacatacaacatgtctagtataatggctaaaatgaaaaatactaacaacaccaagtattgttgaacatatggaaaaactggaacactgattatgggagtatacaaccatgttgtaaaacactttaactggtcatttacccaagaggaatgaaagaatgtatccatataaagatttgaacacaaatgtttacagcaactttatttgtaataggtaaaaactgaaaacaactcaaatgtccatagacagatgaatggatttaaaaaaaaccatgttatatccatacaaaggaatactcctctataataaaagggagtaaactactaatacacagtgcaatatagatggattgcaaaatgattctgttgaatggaagaagccagaccaaaaaaagagatatattgtatgattctatttatgtaaaattctcgaaaatgcaaaggatctacagtgacagaaagcaaattagtagttaccaggagacggagggtaaaaattaagaaggggcatgaagaaacttttttattgtagtaatggtctcatgggtctatacgtatgtcaaagcttatctaattgtatactttaaatatgtgcagttcattgccagctaattatactcaatctgtttttaaaagtaaaatgtgcttcttataagtaacaattttttaaaatgtagtctgatgacctttgtcttttaattagagaatttaatctgtttacatttaataactgatataggcagggcacggtggctcccgcctgtaatcccagcactttgggaggccgaggcgggtggatcacctgaggtcaggagttgaagaccagcctagccaacgtggtgaaaccccgtctttactaagaatacaaaaatgagccgggcgtggtggcaggtgcctgtagtctcagctactcaggaggctgaggctggagaatcgcttaaactggggaggcagaggttgcagtgagctgggattgcaccactgcacttcaacctgggtgacagagggagattccatctcaaaaggaaaaaaaaaaaacctgatatatttgggtataaatgttcaatcctactgtaggtttttttttccattttgcccacttgtttcttgttgctatagtcattacaacaatacatgtttgacttattagaatcctagtattaattagtacttttaccatttcccagatgatataatatgggctttaaaacacatgaaatccgtttacccctcaaaccttttgtgtatcattgatgttttaattctatgtatattttaaacttcacattattatcattattatatttatattgcacagtcactatcatttagatttacttatgtttacccttttggtgtatttcaatgctttcagcacttctgtgtttccctttgggattgcttttcttctgcctcaaaaactctccttactatttattttagtatggctctgctggtgataaattctctccatttttgtttatctggtaaaatatttttccttcattacttatgaagaatattttcactaggtagaaaattctagattgttagttattttatttcagcactttgaagatgtcattgcattggtttgtggatttcactttttcaattgagaagttaattttgttggttgcattattacactttgaagataatgtgtcttttccctggatgttttaaagatttttctctttgactttcagtagttctactatgatgtgtctaggtttgatttcctctgtattgattctgatgggcatttatagaactttatgaagctgcgtctggtatttttgccagccagtatttctttaaatattacttctgctccagtttcatctctcctcctcctttgggatccagcttacacaggttacatctgttactttatgactcaacacacttttctggaaagactctcttttctttaaacacaagacactaaatggttacaggtgttcttttaggtgattatgctgcttcatcagcagatggtgattatatcaagaaggaaacttatatgatgacatataaaagctggggagaggagatgtctctgaagacagtgagaaatccttctctagtcttgctgctggaaccctcaaacacttaagtcatctaataaacattctactgtcttcagaggaattttctcagtgaaagggatttgggacacccctgtgaggaagaaacataagttccatgccttccaaataaggggcaaacttttctttgtagtcatgtttccacctgttgaatccgttttatggaagttgtacagttatggcttgtctgtttatgagaagagatagagaatatgagaaacgataaaacctgaaataatccattgtgaggccacaggctgaagaacttacaaggaatttattctagactttatggctgaaaatatgtatgcatatatgtatatgagtgtatggagatacagttatggatagagatctatagatatatgtgtagatatatagatacataaagtttgctacagaaattcattttgtacacttttaaaagtgcactttactaaaagcatccaagaatgcatctcagaaaaagccttagatttcttttatgtggtcaactccaggaactactcactcttgagatagatgtgtgttttcagagcttatccatgccatgcacaatgatctaaccctttgatagctgcatcattcaaagtcagtttttctacatgcaacaaatttttaaaccttgatttttatttatttatttattttgagacaaagtctcgctcttgtcccccaggctggagtgcaatggcgtgatctcagctcactgcaacctccacctcccaggttcaagcgattctcctgcctcaacctcccgagtagctgggattacatgcacctgccaccaagccaggctaatttttgtatttttagtagagacggggtctcaccatgttggccaggctggtcttgaactcctgaccgcaggtgatccacccgccttggcctcccaaagtgctgggattacaggcttgagccaccgtgcccggcctaaaccttgatttttaaaaaaatactaccctgccctaaccttgtaacttaggaagtttggggagaggggtgtgtaacaacctttcactgcttatttgatgtaaatcatttctagtcctgaaacaatggctattttgcaaggtttaattatactgtgtgttgtggttgcatgcataggtacacccacaaatgtctgtcattaatacgtatcactagctttgtactttacactgtatttttggagtgttttacagtcgttcgttaccaagagtaaattatatatttgcttttctttaccccacccctttcactattgtttaaaacatgtcagattcaggaaaacctcaagagacccaaacctctttcaatacttatagacaaagtttttttttccttaaatcagttttaaaatccatccagccattttggctgccggccataccagcagataatgaaagaattttccttgagggtcaaaagccagggagaagccttccagggctgtttggtttcctagcacagctgctggagtagctcgtggtgctgattgatctgcttggagattcttgtgcatcttcacctgttagagctggaaagatgctcaggactatacagcccagcccttctggtttacatataatgaaactaaggcccaccttagtcaactaatgtgcttaaactcaagcaaatggcaaatggcaaaactcaggactctgtcaatgagttttcattctttttctttattcttctagacacatattttataaagaaatgaggcagcatgatgtttaaaatacttaaagtgagaatgagaaaaactgatgtctacatatcatgaaatggttaaaaagtttaacgtgcattgtcttctccattagaacttcttttacgaatttttttctcaaaatctggctcagaaatcttgttttaaaagctccctaaacattcctaggcagaattagtaacgccttcctctttgctaacaaggaactgtgcatattcctgtaatagaatacttaccatattatattgtaagtattaaattattcatctgccctcctcccacctacccactggatcaggcttcccaggaacagcaacagagagcccagcaatttgtgtgttctcagtgtggaatgaatgaatgaatgaatgaatgaatgaaccaaccattccttcacagtcttgcactatcagtgaatcttatgctttattgaacataaaaatcacctggaattgctgacttaaaatacagttttccaggctataccacaagagatgctaatacaggactggggtaggtccaggaattcgaatttttatctaagtagctgatgacttaatgcaaatgatccagcagccacactttgcaagctctacgctatgattagttgtggtttgtagtcccaattgtatatcataattatctgctgatctgaaaaaaacatagagcttctctacccactccttaccaccagtccatcaccaccattctgactccttagtcacaatgggtattgacattttaaataaatcccaaggctcccttccgggagaataaagaggataatatttataaactattttgagttccttagaagaagggtatcttagctcattaaggaaatattatcatgatataaatctaacatcatgaaacttatcttggacatgtcaaatttggtctaagaatcaaatgtagaggaaaataaaacccacacacagtacctgcatggaaacggaacctgtgcaaacacctgctttggctatgttcctttttgtggagacagatgtcccccttcactaggaccagggtagagatgaagaaggttgatttggacattggggtgctatatgttcttttgggactgaagttccatattaggaaacttaatagctgacatttacataacttttaaacatcccaagtagtacgctctgtctgcacactattttatatgtatgcaatttgtttgtttttgtttttgttttgagacagggtctcactttgtcacccaagctggagtgcagcaggcatgaacacagttcactgtagcctcaacctcccaggctcaagcaatcctcccacctcagccccctgagtagctgggactacaggcacacaccaccatacctggctaatttttgtattttttgtagagactgggtttcaccatgttgcccaggctggtctcaaactcccgagctcaagtgatccacctgctttggcctcccaaagtgctgggattacaggcatgagccactgtgcccagccatatggatttttttaaaattatgaacttacataacttcacaggagacagacctgaatgaggtagttattaaactactttctgactatggaaaggatttctgatccttgtagtatatttccacgtatattgttatactgttgtgtgtttgtatttagttgctcatactattttttactgtagcttactttatatgcaggtttccatgggtcaacctaatttatatttttgtcattttaaatggaaaaatgatatcccatatattttgtagtattatttgttcagtgttctttccaatgtgggatgctttggttatttctaattatttgctatcatgctatcatatacagaattcttatgttcatttctgctcaaaattatatttttgtttgtatgaattccacggtgtatatttcccaaagcgagatagttagataaaagagtaacagcagtttcatagttctggttgcatattacagtattactttccagacacacagagccaatatacaaccccaccaggggtgtgaggcatgctggttttcccacagcttgaccaacatgaaattttatcattccagcctatttctgctagcttaatatgtgtgtagggcctcactagagatattttattttgaagttcttcaaatgatatgaagcaattcttttccacgtggaatgattcactattttcattttaaggacaaaccattcgtttgtatttgacagttttgaagtgacaggtttaattgccttctgtataattgattctgtagggagagaaaataggagtgctattaggtattgggttaggctcaaagagtcaagaaagaagattagttgtgtagttctgaatttggaaacttgtatgtggacgactggaacagaaataccagttgaccctgtttaagaagggctagagagcaggaacattctgatttcatgatgacaaaaatactagagttttgacataggacaacagatcttgcttcaaaatgaaagcaagaccctatccttcctgcctctttgatcctctcacagtgccactttctttcctgaacattttcagatattcttatttcagatagaccactctggtgtataataggaccagttttagagtggccatgaagctaagacatgttatttgagagctcttaggggaagacctggacacagcagtcgcaggagaagtcagtcttatctgtaaaaaggtcagcttgatcacagaaaaaggctttggcttggttgtgttggccctccatggcttatgatcctctttcaagtaagcaaataaatgattgcagtgttggtttgagtcctgtggtgccaaacacaagacacattgttgctcatgcaatatagacctttgttttggacagtggtctaatctgctggtttttaaaacattggtgactgtccaacttataattaaaatcagtctatcaagcacttggagacaaaatctgaggttattctttcattcctagttgtcacactaattttttgccttcacttttgtctctgtagaatatttacacgtacacctatctatatctatttagatataatttatatactacaaaattcacccatgtgtacagttcagtgatttttaatgtattcacagtcatcactacaatcaatttcagaacattttcattactccaaacagaaaccccaaactcattagcagccactctccatttctctacaatatccccaaccttaggtgaccacaaatctactttctgtctgtatagattttgcaattctgggcatttcatataaagaatcatagaacatgtggtcttttggtttagcttatttcacttaggataatgtttccaaggttcatttatgttgtggtgtatataggtactcttttcctttttattgctgagtaattttccattgtgtggatatacaactttttgttaagtcattcatcagttgatggacgtttggattttttccattttttggcctttatgaataaggctgctacgaacattcatgtgtaagtttttgtggggaagtgtggttgtctttttttttttttttttttttgcaacagagtcttgctccgtcacccaggctggagtgcagtggagcaatctcagctcactgtgacctccgcctctcgggttcaagcaattgtcatgcctcagcctcccaagtagctgggattacaggcacacgccaccacacctggctaatttttttgtatttttagtagagatggggtttcaccatgttggccaggctggtcatgaactcctgacctcaagtgatctgcccacttcagccccccaaaatgctgggattacaggtgtgagccaccacacactgccagaagtatgttttcatttctcctgggtaaatacctttgagtggaattgctgggatacatgggagctctgcttaaatttttcaggaactgccagatggctttccaaaatggctgcaccattttatactcctaccaacagcatatgcgtgctccagtttctccacatccttgcaaacacttgttattgcccctctttcttgttatagccagcctagtggttgtgaaatggcaactcattgtgatttgatctgcatttcccatttccctcacggctagtagaatacttacttcctatcctagtttttccttatacttttaaaaaattaaataaagaaaacgctgtagaaaattaaggagcaaaatgtatgcttgcagctacagcttcctctggggtttcacacttccttgcctcatcatgtaacgggccaccactaggatgaaggtgctccagtcttattcttccaatcttctctccatttgtcattcagaatcctgggaaagagagacacttgtcctgccgtgagttatgtgcccactcttttgatttgtgtttctgcctagacagtgcacagcatgagtgttggcatcttgaaaggaaactggggtgctcctgagggagaatagatgccaaagttgggacaagagcccagtttcctgcctttctaggtgtaactcattgccaaggtcgggagcaaagcaaaccatgtaggaaacctcatcatgctgggtagttaataagtatgccctagcacacgttttcacagagaaaacataatacgcttcatttgtaatatttaagtattacatctaaagttacaatgtttaaaaatttatatatacccttgttggatacaaagcatgtttaaaatatgtgacctcatttgatcctcagtaatctctgttagtttctaattatattcagtagtggtattggtattgtatgttttggcctcattgtggtttaaatacacttttgtgaactagcctgagaatccaaccaccaacacaatgatgtaatgagaaaacgtgctctgagttccaaacaaatggctaacagataagtgctcagaagtcaacctttttgtaagctggggtatcactggccagcagtcacatgccagcaggtgtgagtagacagtggggaacaatttcctctcatgtgtatggctccctaaagtgttggctgagcattgtccacatgggtgatgcaaaggatcactgaactaggagcagttgggaaaaaatacaatcattgggaattcctgtagcatcgaaggtgcctacagggaggtagaagtattcatacaacagttctctggtgttctctgttgtagcaaccagtcagccaaaagggttcagctgcttgaaatgagaatggctggatcaaaatggcagctcaggatttaaaggattctagtcagataccagacatcctcacatagagaaaactctgaatggctgggggagaaggagtcaaatgccctggatctttttcttgggcctcaaagtcctccttctgtcatcatccttccagtattgggcaggacctgactgcaggcatcatggcctctgtgaacttctcaagggtatgtattatctgacaaaaactacgatgtccactaacaggccactgaaaaggtatcttagtcagttctgctcattgcccagccaaggcctacgttttataacatgatatcaaagattgcatctaaaattgtgatgatttcctaaaataatcatttcatttagatttttctattttaatccaaggtattcttcagcggaaataaggaaacagtttactctcccaccaaaccttggccagtaccatcgacagagcataagtacctctggcttcccctctcttcaactagtaagtatgagttccaggtttacttagcgattggtcaagtgcaaaagtgcccagggtatgtgtttgcctcctgttccttagatcttcctaccatcacctcacattctccagtcaccagatcctaactctgtgactgtgtctggacatcagacaatatccctctctctctctgccaaccggtacttagggtacataatagaacctctgggagctgtggttttgatgtctctagactaggtgggcttccaggtgactcagtctcatccaaattatggttcatatttgggggagaagggctagcccaaaaacttaccaccatttgtagtatgcatttttttggaaaagcatattccaaaatctgaaatgccaagttacagacctcctttttgtaaaataattttcttgctagtataatttacatataataaaattcacacattttaggtgtacaatttggtgaacttgggcaacttagagtcacttaacctttcctcagtcaagatatagaacacttcttttatcctaaagcgttccccagcgcgcttttacaatctcctctccccaggccacaccctccaactcacgcaatctctgactcacttctgtcaccataattttgctctatctggagcttcatatcctgttacagtatgtacaaaccttctttttttgagacagggtgtcagtctgtcacccagcctggagtacagaggtgtgatctcagctcactgcaacctcaacctcccaggatcagatgattctcctcccacctcatcctcccaagtagccgggactacaggcgcatgccaccacacctggctaatttttgtactttttgtagagacaggggtctcgctatgttgcccaggctggtcttgaactcctgggctcaagcgatcctcctgcctcagcctcccaaagtgctgggattacagtgagccactgcacctggccctaaaccttcatttttaaaacacatttcctcttaaattgaagattgcctacatttttatatcaatgccaattgttgagtgtgcctatatgtgttatattatttgagcactaaatgccagatgtgtgccaagtgagataaatctgacaaatgagatggtttgtaaaaccagcagtgaatattcacttcctctgtgagagagctccagccctcctgtactcacttcctcacacagcacagcagcactcttgctggttctgctgcttatcttgaagaggttaggttactttttgtttctacttattacttcgaaaccacttctgccttagaaattttgtaaccttccgctcagtttccggtaaccgccattttgtctcctgtaacaatttacgcgccgtgtaactgtgaatctttcaaaggtatgttttactggagtgatttctggttatttcagaaggataatttgtgtgttgcgtcattaatgaaatagtagtacgaaaaacctatagcatcttttactgcaggaggtaactttccatgccattttttcagaaaatctacttatgacttcagtggcttgctagactggcctttttatttgtacttttcctgtgtttcagaattgcagagtataataaaggcatgtcaagtgcatattgtgtccattttcaggtatattagataagctttacaccaagataaattagatatgcttattggtttaatttgtgctaatatatatttaattgaaaaatcaaaaaaatttttttaaattgactgaagttgtattccaaaacatgcaaaatttagtttaaaatagattggatacacttttaaattttaaacaaggtagagggtttagtgctttgcttttttaaaaagtaaatgaaggctgcagctttctgcagtagttgtcttgggaagtagtgtggacatcactcctaagagacgttaaggaagtttagctaacaggctttaaccctttctctccataccagcttttactcttttttttttttttttgagatggagtttagctcttgtcacgcaggctggagtgcaatggcaccatctcggctcatcgcaacctctgcctcctagttcaagcaattctcctgtagttcaagcaattctcctgcctcagcctcccgagtagctgggattacaggcatgcaccatcacatctggctaattttgtattttgagtagagacggggtttctccatgttggtagggctggtctctaactcctgacctcaggtgatccgcccgcctaggcctcccaaagtgctgggattacgagcatgagccaccatgcccggccaccagcttttactttaatgccacagccttaaattttctttcaggagaaattattttatgtaaagttacaaaggaaaataatgcttaatatctgtaagcattcgtttggtaagtttgctgcctcctcagtaagttttgatgaaagtgaattttgatgaattactaccttagccgggtagtgacgttaacatgtggcttagctgtccattttctaagatatcaagaaaccagcaacaataagtaaaattgttaaattatgcaagaatcacatgttcctacctgtcatcatttagtcttggttctatttgcatgtgaatatcctttagaatatattactcccagttattccgctttacttttctgaatctcttttcccatctcttgacttcaacttcagtatatggctcttgttccttctacctggagaacggaggcatgtggaagcccagaggattgaattcttttttttttcttttctttcttttctttttttttttttagatgaatagtctgcttaggaaatccatctccataatgtttacctggtatcgtgttgtaatgtcagaatgaagtggctgttcttccccttgagtcatcgtcccgaatgaaggttccccaaaagaaatcatcaacttatgtggtgatttccttttacctttaaaaaaaaatttcttttcatggaaagataatggaacatgtcggtaagattcatttctaggaaggcaaaggagtagtttatcatctaaagactctcaacctaaagctgttttagaaaactttccttaaaatgagaagccgtaggttttcgttgcattattttggctaattgaaaaataagaccaagtgcgttctgaccttcgtttctcttacctttatttttacaaccaccatttcaatggcccacttgctgatacaaatgattgtttaattttaaaaagcatttaattgaagtcaagttatttagaacctaatcatttacacgtctttgttgttgctgctgttttgcaagagtgaagagcttggagtcaggtgaatctgggatgaggtacagttgtcatttattagtcatgtaatttgtgacaagccacttaatctctctgaagacttcagtttcttcatttgtaaaattggcataataatgctgtccctagtagggaatatagaattatataatgggtcctttgtatatattggctagtattgctctcttacgatttggcactatggagacactgtgggagattaaaagaagatgatgaataaaaggtgacttcagctctgaagggctttatgatccatttgggagaacaggtaatgtagaatatactggcttcaaaagtggcaggtgtttagaagagaaaaggatacatgatgtgataggaggcaaaggcttgattgagaaggctgagaagacttagagtaagggttctcagccctgactggacattaaaattatctagggacaattcaatcagaattcctgggggtggggaccaagcatcagtattttaaagttccctggggactttaacttgaagcccaggttgagaatcatttaaacagctctgttatttatttatttaaaattttaatgtattttttgagatggagtctcgctctgtcacccaggctggagtgcagtggcgcaatcttggctcactgcaactcctgcctcccaggtccaagctattctcctgcctcagcctccccagtagctaggaatacaggcgtgcaccaccacaactggctaatttttgtacttttagtagagacagggtttcaccatgttggccaggctggtcacaaactcctgacctcaagtgatccacccacctcggcctcccaaagtgctgggattacaggcatgagccactgggcccggcctagttttactttttttttttgtaatggaatttccctctgtcacccaggctggagtgcagtgatgtgatttctgctctctgcaacctctgcctcctgcgttcaagtgattctcctgacttagcatcctgagtagctgggattacaggcagctgccgccatgtctggctaatttttgtatttttagtaaagacggggtttcgccatgttggccaggctggtcttgaacttctgacctcaggtgatccgcccgcctcggcctcccaaagtgctgggattacaggcttgagccactgcgctcggcccatttaaaaaaactttaaaggtagacgtattccaaatggggggaatatataaagaaaggtaacacttattttgccctgtgtgctttgaatttcagaaggtgtagtaagcaaagaccacttactaaccctacagatatatccttagaaaatacagtggtttctgtcataaatctgataaatcagatgagaggaagggtgtatgtttgatgttgatttttctttttgttttattggggtttttaaaaactataaatatcaggtctgatgactatgtgtataaacattttctaagtagataaaatattttcaaattttgcattttttagtatgaaggggatccatcatttgaagttggttttctagatgtgatgataaacttgtcccaggtctatttgacactcctaccaaaatcctttgtgaccagggctagaaggcagctgtggctagtaaataaccctgtgtgtagactcacttattggctttggcattctctattgccacagctgtgtgaatagattaaccagagaccctctggtgccagccacctattcaggcaaacaagtctataatcagtacctctgttaaaatgaaactgtaatatactattgtcttttcatttatttatttatttatttagagacagggccttgctctgtcgcccaggctggagtgcagtggtacaatcttggctcactacaacctccgcctcccaggctcaagcgattctcctgcctcagcctcccaagtaactgggaccacaggcgcaccattgcgcctggctaatttttgtattttttttgtagagacggagtttctccatgttgtccaggctggtcttgaactcctgagcttcagtgatctgcctgccttggcctcccaaagtgctgggattacaggtatgagtcattacacccggcctattttctgattgttcaaagtagaagccaggcacaatggctcatggctgtatgtaatcccaacaatttgggaggcagaggcaggaggatagcttgaagccaagagttcgaggccagcctaggcaacatagtgagaactcatctctacaacaaagttaaaaagaaaaattagccaggcatggtggcacatgcctttagtcccagctacttgcgaggctgaggcagaaggatcacttgaactcaggagttggaggctgcagtgagccatgattgagccacagtactctagcctgggcaacagagtgagaccctgtctcagaaaagaaaagagaagagaggagaagagaaagagagaagagaagagaagagaagagaagagaagacatacaaaagaagagtaacatacaagagaagagttaggagaccctgtctcagaggaaaggaggggaggggaggcgagaggacaagagaagaaagagttaggatctatgccctaaggaagtaaggaggatttgagactgtgtaggtggttaataaccttaagctacatattttatggagggaaaaatcctatttttaaaagtgagaatagaacaattttgaagtgaaatggaatgaattagctggaccataacggctctgactgaagaaaaggatgtaaaaagccacatcctggatatgtaccaaacaccatggttacatggcatgtttgtatatgtaacatttatttaaaaaaaaagtctcatagcttagaaggcatttatttttgttatgtgtataggcttctgtgcaataaagcagccttttttattttacagctcatgatgacttaaatggttaattgcctgataaatatggtcctcttttattcttctgattctgttgttcttttgcacttcatctttcaaggggttgggctattcttaggtttcactgattgcactggaagggacatgacggaaaatgaagatctcaagataattttcttgcaaattcacaatggaagataaaaggaaagagtggcaggcattctgcacacagagcagacgtttctttattgtcattgttcagcagaggaatcaactcagccttggtgaaactagagtgatgcccatggtggcatgtcagcatctccctcttagtggcatcagtgctagattgttgttgttggaagcaggagagtgtttagtccataaagtacagaacttcgatatcacagaagctagaagaactttactgccttcagcttcgtttaaagatagtagagagcttactcattcgttttagaaatatgtattgggtctctatgtcaggaactgctggcacagcagtgagattgaagatacaacagtgaatacaatagagggcctatcctcatagagtttgcctttcagaatgagggacagacgcagacaaatagaaaatgtcgattgtgtcagggagtattgagggctttgaagaatgaaatcgtgacccagaagagatgcttttagattggatcatccgtgaaggcctctatctagaaaggagacacttgggcagaattctgaatgaacttgacggacatctgaaggaaaaatattccagtcagaaggaacagtacgtgcaaagtccccaaaacttcaataagtgacgtgctccagaagcagcaaggaagcagaatgaggcctgaacagagtgggcagtaggaaatgcagtcatagagaaagcagggctgggtcacaggcctcagagactgtagaacattggctcctactctaagacaggaagctgctgtgagcattgaggttgggcgtggaaccatttgactttttatgaggatcactctggctgcagtgtggaaaatagactggacgagggagggcagttaggaagatgtcacggtaactcaggaaagcaataccggtgctttggacgagggtggtggcagaagagaaagtgagaagtattctggatatatttcagaagaaagtggataggattttctgatgggtgatatgtagagtgtaggagaaagagaagaagcaagattgactttaatgttttccacctgggcaattggtggactggaattgccacttgcagaagtgtggaggtatggaaggtatgggaagagcagattgccaggaaagttgagttagttttgaactcattgtgtttgagaggtctgttaaattatcaagtagtgatgttgaggtgtaattggaaaagtcaacctggaatttatggcagaagttgaggctgcagatataaacttgtaattttaaaaatgtatatttaaagccatgggagtgaatgagttcatttgagattgaatgcagattgagaagagatttagaattgaactccagggcactgcatagcaggaggaaaacctagtaaaagtggtatctgtaaaatagaggaacgaactgtcacaatttgcctggtactgaggattttctcagtacatgagactttaagagactgggacaccctgagacaattggttgccttccatgggaagaaagtatgtcaagagggagagagtgaacaactgtgtccaataaaccaggactgagcaaaaaccattgaatttggcatcatgaagtcttaggtgactttgacaaggcttgtctgttgtgaacagccaagtaaatgtgaggaccactctccaaaaggtaaagaaacatgcatgaggatacaggtgcgccagctggagacatcatgcctcttccccgtccccaccaggagtggcgtgaagcctccccagtgctgtaacgaggcagccaggtcctgtgtgactgcacatgtgacttggggcaagtcatttaacctctctgttttcactatcctatttgtgaaatattgtttagatttgtggtttgagtcagctatctgtatactacactgtgttaggagctatgtagattaattttcaacagatatggttctggggttgtaggaattttcaatttgagaacaaattgaatcttaccctttgtcaggagaaatagcctttgacatgtgttaggggcaagggaaatctcaaacttgcttaattttaaaaatgaatatttggttgtggataatttaagctttggtgatatttctaattattttttgtgtgtttctagtctactgaccagaagtctgaaaaaaacaactaaaaagaaagactgcataagccttcactagagaagtattgaaaattgcttgagggaagtgacggtttctttagcctagtgtctgtaggaccccagtgtagtgtttgttgaatgaatgaaaggaggcgtatcagtcaggttcactcagagaaacagaagctgtaggaaatccatatggatgtgtgtgaaggtattggcttgcctactgctggtgtgtggctaagcgagcttaaaagtccgcagggcagatagtcaggaaggaaatattcccaacagactgagctcccttgggcacaagctgaagcctggagtctgaactgccagagagcctctaccttcttagaaaaggcttcccactggctaagtcaggcccacccaggggaatctctcctttgattaacttaaagtcacctgtttagggactttaattacattggcaatagtcccttcacagaagcacctaaatgactgatgatgtaactgaaaaaatgtgtgtgtatgctacaaaatggctgcagtctcccttctgtcctccagctcttgcaggagaactctcttgtagctcaccctgtctgaaaacatactggaaaggaattcaaggaaatgtagttcagcctagccacgttgacacatcatgaagccgtcacaaaaggtaaagcctggtttaggagcatttgcatttgcagtcttaagtatttttgtcttatttttcaaaaggggttgggcacggtggctcacgcctgtaatcccaatactttgggaggccgaggtgagtagatcacttgaggccaggagtttgagaccagccaggccaacgtagtggaaccccgtctccactaaaatgacaacaattagccaggcgtggtggcgcatgcctgtaatcccagctattcaggaggctgaggcacaagaatttcttgaacccaggaggtggaggttgcagtgagccgagatcccgccactgcagtccagcaacggagtgagactctgtctcaaaaaaaaaaaaagtagttttggtttttaatttttgattttttcttatgttattacatataacgaatgatatgcatactctgaaaaatcatgacataaaggtgaccttgaaattactttgatgttcatttaaactagtctttggtctccactggctaggagaccacatatagcagaacagcagagaaagcaaaacagttaattttcatgtttggcttttgagcttccagggacccaagtcttgccttgaaccgatcttaggaaattcctcattccctacccgaccctgtttctaaactgcatccctgctgaaatgcaatgccactgtaactctctccaatatttgttttcttctttggcttaccactagatgtatgtatatatgtttgtgtgcctgtgtgtgtgtgtgtgtgtgtgtgttgactgcctcatagtaaagcctactcttgagattaagactcctgatagtttagagaacagaaatcttttttagttcctggttattacttgaatttgcaagaggaacaactgctaggaggcctagttaacagtagttagggtctccacccacttgccaagggcaagactagtttacaccacatttggaatgaccagtttcctcccactttagtttcagtgtagaaagagtaggggagacgaactattcaatgtcagcttgggtgtagtgccagaaccgtactcagtaatgctgtcattgctgttggtgcttaccagctcttcagtactggaatagcttcagacctcgagagtttatgactttatcatcaactgggtgtgttgcccttggcacattgccacacagtgcttaatgatgatatatgttctttatcaaattccccccaccaaataatggcattatttacgtgtgagaaagttgcacatttcaccacctcatggtttattagagtgcaattccgtgagaacaactgcctgtgatcctctgtatccccagtggccaactcaggagctcagtatgccctacccagtagatgctcagaacatcattgctgagtgaggaagtcagccatcattttctccctggatagtctctcctgtagataacaggggccgttatcagccaggtttttcatcatttgtggctttgaatttcagggacatgacaagtttgctttttgtttcgttttgttttttttttttttttggttttctagagacagggtcttcctgtcactcaggctggagtgcagtgatgtgatcacagctcactgcagcctcgaactcctgggctcagtgtttctcccatctcagcctttggagtagccagcagtataggtggtgtaccaccacacccatctaactttaaaaaaaaaaaaattgtaaagacagagtctcacttttttgcccaggctggtctcatactcctggctcaagcaatcctcctgcgttggcctcccgaagtgctgggactgcaggtgtgagccaccttgcctatccaacatgacaagtattattctctggcaggaagtgaaattttttctcactgatgattgcacacaaatgtcatatctccatgaggcttctactcactagttttacggctcatgtcaccttgcttcaaactatgcttcagtataattttgaagtgtatatttccattgcctctccttgagtaattgatattcttcacaataagtttacatttattatcacttttatttacttactattattactctgagcagccaatcttatgagaagctcagagtggaacgtgtgggtcctggtaaatatattatttgactcacttccaaacacacttaatattgcctggtgttttgattatttcaaaatatacagatttcttgaaaggcctgcaaaaggaaacaatcaaaattatagcggttaagaatgtgagtctgccttggtttgaattccagatgggccagtccctagctgtgtaatcatgggaaaattattaaatctctagcctcgctttcttcatctgtaaaatgagcatacaggctgagcatccctagtccgaaaatgcaaaattcaaaatgctccaaaatctgaaactttttttgtgcctccatgacgccacaagtggaaaattccacacctgacctcacgtgataggtcacagtcaaaacattgtttcatacacacaatacttttttttatttgtataagtttaagtggtacaagtgcagttttgctacatgaatatactgcatagtggtaaagtctggacttttagtgtctccatcacccaaatagcatccattgtattcattcaggaatctagcatccctcaccccctcccatcttcccacctctccaagcctttcatgtctagcattctgtgtccatgtgtacacattatttagctcccacttctaaatgaaaacatgtgatatctgtctttctgtttctgagttttttcacttaagataatggcctccagttccatccacgttgctgcaagagacatgatttcattctttgttatgactgaatagaattattcaggcacaaaattattaaaaatattgtttaaaattaccttcaggctatgtgtataaggtgtatatgaaacataaatgaatttaatgtttacatttgggttccatcccgtggatgtctcattttgtatatgtaaatatgacatgatatgaaaaattcaaaactctgaaacaccaattgaactcaatttgcagtaagaatgcatacctcacagggttatagtgaggattgaatgagacaatcctagtccaatttctttgcacatagtaatgctcaataattattacttaaatgggtataaactttatagtaatgaggttggggctggaaaaaatgcagtttcataatttcctatagaagtcattcaatcctgactctaaactctgtattccatgtggtggttgggtggcgtgggagagtcctctttatcctgtggggttggtcctatggaggtgtctgtggcagattggcagatgcatttgtcttgtgcatagatggtgtctgttgtttcctctggcagagttcaccagtgtcctaatgcaaacttagtcctcatctggctcctgcacaggctgatctctggctcctttagcccctcatggttcctgttgtttcattttcagagggacccttgtaaggactatagtcctctcttcagctgaccttcaggtccccagtcagaaccaagggaaccgactctgtcccttctcatagcacctgaaaaccccgggaaacgaggggaatgctttgctctcagctactgaggttgtcctgtcaccttctcttctgccctcctttgccatggcataggataatgtaagtcagcaatctcattactcggtatatagccagaggaatataaatcattctaccataaagacacacgcgtgtgaatgtttattgcaacactattcacaatagcaaagacatggaatcaacttaaatgcccatcaatgacagattggatgcagaaaatgtggtacatatacaccatggaatactatgcagccataaaaataatgagatcatgccttttgtgggaacatggatggaactggaggctattatcctttgcaaactaacgcagaaatagaaaaccaaatgctgcatgttctcacttataagtgggagctaaatgatgagaacttaccaacacaaagaaaagaacaacagacactgtggcctacttgtgggtgaagggtggtaagagggagaggagcagaaaagataactatgtggtcctgggcttaatacctgggtgataaaataattgtacaacaaacccccatgacatgactttagctatgtaacaaaccttcacatgtacccccaaacctaaaagttaaaaaaaaaatcccagacaggaagtagggcatattttgcctaatttgcagcttcatcctcactccctaacttacgccactcatgtctcctccatcatcagggacagcaagagtggggaggggacgaggcctgccacatctccattctctgatcttatttcctcttgcctcttcaacagcgctttgtctctcctctccagcttgaagcccttactctggtatgtgatttcaaagcgatgaaaaactggtttcgttagtacttcccttggatctgcccttgtctcccatcaaggcagtgcaagtaaagaatccaagatatttgttttgttggtccactggagggtagagatagagaaaaacagtaacttccccaccacccccaacctcccttgggctgatgactccaaagactgccataaatgaacacttcatagagctgctattaatatgacacaaatctacttgatctaagggattcttttactttcttagggtggtcattcctaagtctttggatttcacagaaaagaaaatatattttaattgaggactgacaaaggttgccaactttttatcaattataagaattgtttttataattaccatcaatttctattatttcttttactccccctctttccaactgtggaaggtaaaattgaagagcaaagaacacttatttcaaagtgagtaaatttagctatatgaaaactcagcagattgccctgagtttccttgcgtagctgcagtccagtggaaatttcttccagaccagcaccagtcgccccagtgacatttagaaatcactgccctggattgtttcagccaccgaaacactcggtgttcactgtcagctatgattatatatgaagtgctttcgagaaccaatgtatagcataacttaggccaaaagaaacactgtgcctaaacactcagccaaggagtgttgagtttgcctggatttctggaaaattgtctccgttccctagttcactgtatttgggtaaacaaaacatggcctcggagagcctttgcgggagaaattataaaaattcagcaaagctttgtgatctcattttggatctcctcaggattcctcatcaagttgcaattaaggagagaaaaattccgccttggggtgggattttaattactcatcatgttatgacttgactttctgtgctgcatttttttccatatcactacttctgtgtttgacagctcctccaaagagtcgctccgttttatgccaggagcgaagtacttactaagtcaaaggaaagcaaggcaaacatctactattgcctttgtgcttttaccagaaaactgggtgagaacctccttttccttttccctgcccctccagcctcagttttatgaccctgtggagccagtggactttgaaggacttctgatgacacacctgaacagcctggatgtgcagcttgcccaggagctcggggacttcactgatgacgacttggacgtggtgttcacgccaaaggaatgtaggactttgcagccctctttgccggaggaagggtaaatagttttctaaaatgtagatgtgattgggattgtcatgattgttttcaataagtgggtaggggagatgccttcaatctgaacttaaaaataaaataaaattactcaatccattcaaatgtgtgggacagctatatgatatcatcatgtaagtatagatagtttttaaattagtttggccagagattttgaaaagctatgtgaagactaagccagtgcaagggatgcaggaggaccaaatgaaatgctcaagaggaggttaaaagtgcaggctctggagccagaccacctggctgccagctcagtgaccttggctgtcacatgacctcccaaatcctcggtttctccatttgtaaaaatgtcaagatttttaataataattactgaaatgccaccatccagaagcattttaattgcttacagttatgagactggatcaagttagaaacataaggtaaacccacatttattgagcatctactatgttctgggtactgagataaaaagatgaataagtcaaagtccctcctttaaagaaagtgtcatgcagtgctaaaacagtggggagagctctgtagaataaatatgtgaatagctaattagggcttgagtttctatagttggctcttctatatgtttataggcttgggcattagtttttggcatcaaactaactgtggaattgtagctaaatgaaacgcctgttgcttctaaaatgtaaaaaaaaatgtctctttggaggtttaggataaacttttatttacatttattttaaaagccaaattaagattcatatcctcctggacaggttccatcttctcatcttccccagaaggtcccagaaagaagatcctgacacacagcccctgccctctttactctgagatattctagttctattttggattttatttcatcacagtttaaggaggttggatgataatgggctggtattattgtgaaccgttgctctcttgttcagacagtcctcactcacataggagaactgaccatatgtgtagctctgatgttttaaaaatacacacttcccaggaaagaaaaacattgtcatttttgggaaacatactcccccattttcagtccatttattcaggtatgactttagtataagttaacacctactatttcatctttagtgaagaatcatttaatttattcctttatgtaaaatttatggatgtttccaaatatggtcagaatcttggaaaaagctgtttaaaatgcttacagtagccagtcaccgcagcttgttcctgtggtcccagctacttgggaggctgaggcaagaggatcacttgagcccaggaatttgagttcagcctgggtaaaatagtgagaccctgtttcttacaaaacaaaaacaaaaaacagtacaatgaatttagaggaaggaggaggtttttttttttttgaaatttgataaggaagataatttctttacttagcatcagttttttagtatactgttgccttgtcaaaagaatttataggtaacatacctgtctgatgtctttaagacagcctctactatttcagttgttgccaaaaagtcttctgtataattaaggcaggggaaggtatcatcatcacaccagagtaaacaatagctgactcctgttgaacaacctgtgcctagcccagaactttatgttgagctgtgatggcgtggtagtgaaaaacatgaacgctacaggtgagctgcctggattcaggtccctgctccaccacttgctgtgtgacttggaacaagatccttaccatctcatttttctgcaaagtgagaataatagtaatgcctgccctatggtgctgattgagaattaactgaattaatacatataaagtgattgcctcagtgcataatgcacagtaaatgctacctaagtgtaaactattaatatcatatatgcgtcttattgtgtgccaggcagtcttctaagcactttgcacactaaccgatttaatcttcatcaaagctgtctactaaaaggggcactcttactactctaacagctttaaggagaggaaactgaggcacagaagggttgagtgactggcttatggtcacatagctataagcgatgaagctgggatttgggcaattagggcccagagactgcatgtgtaacctttacaatattttatctaatactaacagcatgtctctgttcttacctccttatcacagatgagaaaattaaggcttgtagcatttaagcctgtttatttctggtactaatgcatttgcaacaatagcaaaaagctttgctacaattgttatttttgatttcaagactctgaagcacttgaagagtattgctcatggtgcattccttaagtagacatgacaggaaccaactgaattaatgatcaccaacaaaagccagtgtttgcaatttcatcaaagcataagacaactgttctttttcctggctttcaaaaaggagaacacgcgtgtcctaacaaggttacacatgcataaaaaatatgtccaaattaccctgtcagagataggtatttatacttattttccttgttttgtattcgaatacagctagttctacctgtcttgtgtctgaatgccttcggggatagttataatttaacatgattctgtataataaagaaaacccacaaagcaaaaaaatgccaacatgtttgtctcatcaaagtaaaaatgtttattgccccaggaatacttcagacatttggaatgattgggcaagaacatcctaagcattctcactgataaggatttaaattcgtgtcatgttccttgctcatgattaggggttgttttgttgttttacccagtaataacgtgtttatttcattttctacctcattagggttgaactggaccctcatgtcagggactgtgttcagacctacatccgtgagtggctaatcgtgaaccggaagtaagttactttttttccactttttgtatataaatattaattttatattgctagtttttaaatatttcttaatactttgaacagttctaggtttacagaaaaattgcatggcaaatagagttctcatgtatgccttccttatccccactccatatcacacacacagttccccctattatgaacatctcactttagtgtggtacatttgttacagtagctgagccaatatggatatgttgttattaactaaagaccatagtttacattaatgtttactttttgtgttgtatattctatgggttttgacaaatgtgtaatgacatgtatatgcctttacagtatcatacagaattgtttcactgccctaaaaatcctctgtgttccacctgttcatcctccctccctggcaaccactttccttttttactgtctccataattccaccttgttcttcaatgtctttttgtggcttgatagctcattttttttattgctgaataatctttcattgcatggctgtaccattgtttatttatccattaacttactgagaaagaaagttctattttaaacataaagaatagactgcaagcttgcccaacccctagcccgtgggcaacatggagcccaggatggctttgaatgtggcccaacacaaattcataaactttcttaaaacattatgaggtttttttttttgcgatttttttaaagctcattagctattgttagtgttagtgtatttgatatttggcctgagataattcttcttccagtatggcccagggaagccaaaagtttgggcacctggaatagagcctttttgttgtcttctaattctgatgaattcccagggggaaaaattaagtgaattgaaacctggcctcagcttcagaggtggcattcgagtttatgaccaagaaataaattacttgctggccttccagtaagggatctttctctcctggattaatcaaaccttctgtgacattgttctgagctttttctctccatgccatggacctggacagcactctctcatgagaaacatctatgcacattgaaattctcagcctgcatgggtgtacctgttggggagtgagatgtggactctctacagattagggcacaccccactagagacacgtcacagaacctttgacaagacattagtagtttaaaattctgatagcctcactcctcctatacctcagtaagaattactattctatggggtaaatgatgaaagactttgaggattgggttttatctagctcctggaagggtgccattgagtttgtgctgaggttttctggagtaatgtcaatatgcacacattttcagcagcagaaaaagagaaagcattcattattaaaagttattaagagaaagttagatgccaatccatcatctgttctaaaatgaatggaaaacaaagtttgctgggcagtcagataaaattatggtttgctgataataaataaaagatttcagaacaagttgttctcaagtttttaaatgctatcattagaggtactttctggacattaaagatctaaaaaaaatctgagaaggaacaaatagaaagatccattttgatacatttggttttcagatttattttctatttcgggcttgtccactttttcatttctcatggcaatgcacgcttcttggagtagtgatttttcttgatcttgcacaaatgtaagagaaaaaaatgactctttttggaatactcgttgaaattttagaaataattatgaaacacaaatcactcagtttcactctagacagataatcatcatgaacatttgatgtctgtcctttgaatagtgttgggtttttttggtatatatttgcgtgaaaactaaataagattataatatcatttttgtaacatgcattttcagttttcacagtaaagagtgattctcttcctttgctattaaatatgcttcctcaatacaatgattgatgattgcataatatatttataccaaaatttatttaaccaattttaatatttaggtgattccttccttttcagtgttgtgcttaaaatgcaaaaacatccttctcaggaaaaatttgtacatatttatgatttttttctttggaattaattcctacaagaggaatttctatgtcaaaggatatgcacaaatttaaagatttggaatactagatcaaacattatgccgggcgcagtggctcacatttataatcttactcagcactttgggaggttgaggtaggaggatcccttgaacccaggagttcaagaccagcctaggcaatatacagagaccccacctctaaaaaaattttttaaaaaattaactggatatgatgacatgcacctgtagtcctagctactcgggaggctgaggcaggaggatcacttgagcccaggaggtcaaggctgtagtgagtgacgattgcaccactgcacaccagcccaggcaacagaggaagaccctatctcaaaaaaaaaaaaaaaaaaaaagccaggcacggtgctcatgcctgtaatcccagcactttgggaggccaagacgggtggatcacctgaggttgggagtttgagaccagcctgaccaacatggagaaacccagtctctactaaaaatacaaaattaaccgggcatggtggtgcatgtctgtaatcccagctacttgggaggctgaggcaggagaatcacttgatcctctaaaaatagctaaactgggaggcagaggttgtggtgagccaagatcgcgccattgcactccagcctgggcaacaagagtgaaactccgtctcaaaaaaaaaaaaaaaaaaaaaaaaaagattattgacactacatgcatgaatcctcaagaatattagatgttataatttatcaacatttccaattttatttgataaaaggttgtcttttttttcattttcttttactattagattaggcatctttcttctatatatttcttggccattttttatttttcctggtgctctgcttattcgtgaaatttgtgcatccctattaatgtatttgtctagtctgatttatttttataagcacttttttggtaaagatattaagccttgtctaccatgtattaaaaatgtcttccccagtatgccttttgtcttttaaagttgtttttaattttcaacattcagaattatttatgtcattaaatctatattaatatttttccttatgtttaattttggcatcatgcttaaaatttgattcacaaacttattattattttctaagagtatgggattaaagcattaatccagatcattagccacttgactgttgcttctgttcccttatgtgtctccatttgtttttatcttttctacagaagcaatggttacccatatatttattatatgcaagtttttgcatcttgttcccctaaaaaagaaaggaatatgtgttttaattttatgtttggcaacattctagggatgggattaccattggcccagttctctgcacccctgtgtaatggagcagttcccttcttaacggtcacctagtggacagggagaagtgtacaacttcagaactcattgtcagtttctggcaagctttcttgtagaaaagttgcatctctttctatccctctgcctcattctcttgcactctgaatctaacactctgcccatgaaaactaaaattcctagcacacactcctcccagggatcattctgtctctatatgcacctgtcgtattttatctgtggggagaatccagtacactattgccagatgtccttcatctcccaacctcacacagtacatttttagcttattgttttctgtgagttgtatctgtattgttttagaatgatggtagaaggagaaggacaaggagaaggtggtgattcatataaatgaaaccagctggaagctgtgatgctttcatagataagccactattatgaagaaggagacttcagatttctgtatagacactgaccagggactcgtgggcaggaaggtgtgcaacaccttcttatctttattcagtgagttcccctttggggagacaaagtttggtacatccttctctttccagctccatctgatccacagaggttctgtccagattcaggcattaagttatctcttcatttggatgagtttccagtttttctgtgtcttcataagtggtttactagaaagtcggaggaggatgcaataggggttgctggccatttgttaattagtgattaattatttagctctcctttaattggttatgtgccaaatcatgtatgattgttttgaaagaaatcaagtaatatggaggtgcattaaggaaaaggcaaatctcatgcctcactacttaccagtgtcctacccttcccttaactcactcttcactgcgtaaagcccagctgtgtagcttccagatcttttcataccctcacaaaaaatatttgtctatttatatttttcacataaagatatatgtattaatgtatgtacttatatattacaaacatttctttaaaataactgtccatgtcagagctatatcccattctactgaaatgctgcctagtattcaaagggtgaaggaatgtgtcctaagttactgaaactaaatgaccattttggttgtcaccatttttcataattgcaaataatactgaaacaaacatatctgcacatttgccccatacatgtgtgtgaatatttctgagggtagaaatgaagccagtgtacatggtatgctctgataggtactgccaaattcttctccagaaaagtcgtgctgtttcattccattaccaactgggcattaaactggcgtgttcccatattcttgccagtgctggatattatttattaaaataaaatttcagttcctccagtcttcttttagttattattttaatctggaagctattacacctactttctgaatacagtttcctatcaccaagtttcctttccttatgtgttctaaaatcccagttaaatatgcacttaaccatacaaccgtaagtcccactcttgagtatttacataaaacctatgtgcaaatacagcagtttagcagttttatttgtaattgccaagactgcatagcagttttatttgtaattgccaaaaactggaagaaaacccagattgtactcagttgggtagtagataaacaaactctggtaaatccatacaatggaatactactcagcagtgaaatggaacaaacaattgatatatacaacaacatggatgaatctcagatacagtatgctaagtgaaagaagccagacaaaggccgggcatggtggctcatgcctgtaatcccagcactttgggaggctgaggcaggtggatcacttgaggtcaggagttccagaccagcctgaccaacatggtgaaaccccgtctctactaaaactacaaaaattagctgggcgtggtggcacgtgcctgtagtcccagttactcaggaggctgaggcaggagaatcgcttgaacctgggaggcggaggttgcagtgagctgagatcatgccattgtactccagcctgggcaacaaagtgagattctgtcttaaaaaaaaaaaaagaagaagaacccagacaaaaaagataactgcatgattccatgtatctgacattctggaaaagatgaagctacagggatggaaaacaggtccatggttcccagggtctgggagtggggaagagggctgactacaaaaggacacgggagtgccctttgcgtggtgctgggactgtagtgcccatgatgtaaaatctgccttggaccattacattagaagaaatcaattccagttatcccaatattccctccaagtgaaatactttggtagcatatataataataattcaataagtattagctattatatttattaagtagtacctatcagaaaacatacttatattagcatgtcaaaggaatgaacacaaaattctctcccatatattgaacgcaccatggaggggggacctgccttcctctggaggaccatacttagtgaagccactttgccttataaggacatgcctttgttatccagaaccaagcagtcaaacactgatttagttagctcctttatttctcagttatctcctgctgatattacatttctccataatatctagagataggcttttatgtccttgctagctgtggtaatggttttgaatcccacttagggggcagaggagtagagtaatggccacttgtgttccctcccaccctcatcattctacagggcatttgccactcaagtactgtaattgagacatttaaatcatacaaataatgctgcccatgaaggatagaggaaatttttagatttccttttaaacctaacagagaaagattaagttacataaaaatgtaaaatacatgatctccagtacattgaaggaaatgtattttcttacttgaaatgtttgtgttacttagactggaagatttattaaatgatttccattctatcactcatgtttacagcaccaaatttggtgtccttgttctaaaaacaatagtacttttctccccatgacttttgaaaatgattactggtttactgattagcatggcgccatgtttgcttgtttgtccaaccttttatctgcatattttgataatgttgtgtggattaatatttgatgacatcctttgggtgatattaacgattttaagctttatttcttctgtcattttctctaaatgaaccaaagagggataaacttcagaatgtttttgatgcctggtggagagctgaactcttaagaaattaaacttgtttacatactatatttattcttgccgcagagacagtgaaacatttcatgagtgttatgggcagcatcataaaagcctttagactttgtttttcatctggggtgattaaggtaattctgaaggaaggttgagctcaaggagagctgagatatcaaggaatggggtatcatctgttttattactccatattttactcccagtgaagtggtaaacaattaaaattcaaacacatcagtgcatataattcagttactcccagaacaccataaaaatgtttccctgatcaataattgcttattatgacatgcatttgttgtgctagctgtcaaggtgcttagctatttgctttctaaaagtatgaaaagcacgcccggctcatcagcctatgtggtaacaaagagcaatccagctgtggatgtcacagagccactcttgacctgttgtgcatagactccctccccacaaatccaaacccactaagactctccaggctctgttaacacacaccagcctggttcagcttggatgccctcctcacaccatgtgggttctgattttccatgccaggcagtccatcttaaatggatgcatcctcaccgtgtttgggcttcaacttcctattctggacctcctcggctactccctaccccaaggcatggagggctgccttgttctgatgcaccttatgattttagcaccaaattgtacaggaagggagagaagggaaaggagaaagaagatgtgaaaggaaagagagggtagggaagaggaaaaagaagatgaggaacacgtattattttctaatcctcacaataggtcctcaaaatgagcaacatttccccctatttcatacttgaggaagctgtgactcagagagactaaggcacttgcccaaggtctcttagtacattaaggagccagcgtctgcacccagttccttctgactctagagcctggattctgctggctgcaccacactgtctttaaagagaacactctcaaaacgcgcttggtctttggattgtctcaaatgtgttagaatagtgttttaagaaaaggaatgcagatctcctgggaagcaataggtcgagttcatttcatgagaatcatttttctagccattggcctacttccccatttttctcctgtctgcatctaggtgcaacaggaacttggctttatttgactccattgccagggtggggtaatgaagctgggactctcttgtagccagcggcagtgagccagcagtctcactgcctacccagtgatggttccttctgtggccagcacttctggaatgagtcatctttacatgtttgccaacccttgtcctctcctccccagccaggttcacccttgctgctgtcaaggagctttgagactttctgagatttttaaatggggaagtagatgttaaacctagtatgaggaagagagggaaagtttgctctggtttcaaacacacagtcatagaagatgctagtcttaatgctttccatagcaaaaaccctgaaggcttagagtgtacacattgtgaactgaacttttaacattattgtgtaactcatttgttaatgcctatttgtcattgactgtggggtccatgtgaaaaactcccacaaacactctaacaaaatggaagacagaaaagaaagcaagcatcatttgtgtacaatagccaaagaacaatagccaaataaatttgatggtctcaaaagttaagcatcttttgaagagaaaatttgattttagggccaggtggggtagctcatgcctgtaatcgcagcactttgggaggcagaggcgggtggatcacctgaggtcaggagttcgagaccagcctggccaacacggcaaaaccccgtctctactaaaaatacaaaaattagctgggtacggtggcgcatgcctgtgatcccagctacttaagaggctgagacaggagaattgcttcaactcgggaggcggaggttgcagtgagccaagatcatgccgctgtactccagcctgggtgaaggagccagactctgtctccaaaaacaaaaacaaacagaaaaaagaattgattttgattttttcagatacagtgcatgaactttttatcataaaatattaaagctggggaaaatatcttagaattcacctcatgttcatgctttaccctgtgaagaaacagaggcacagagagaaataacttgaggataatggaaacaagcacacatctgtaagtgtgtgtgtgtgtgtgtgtgtgtgtgtgtgtgtgtcagagagagagagagagatgttcctttgtaagtaaacactcttggaaatagccgcattttattataacacaaaaagtaatgctaaagctgatatagttctggttgctaagcttcacacacaaaaggtctttaggtagctgcttcctaatttttatttctgtggcccaaaagtctccttgtaaaccttcgtgtcatgtcatactaaacctttgacatcaataccctttaaaatgtacaagtccttaaaaaaaaaaaaaaggcaaagggcaaatactaatgtgggaaatttgaattttaattaactgtttgtttcaatgttaggataaattaatgttagataaattctttggtaatttttccccctaaaattggatttttcaagaaacatcactggttcagtatattgttatttggggtagcataattttaggcgataacttaatatttgcatatatttgtcactactttgagttggtttttgtcccctgacccccagccaggatgttagatcacacagatttttttttctttgagcccttagggagagtccaaaacagtcacttcatgtactaggaaagtttacccagtcagcacacacagatatgttgttgcctacatttatatttgtgagagtgactgttaagaaactagcaggtttataaaatccgtgtgagaatttctctcaaataactgttaatggacaatccagcaatcctcccatctcaggctcccaagtagctgagactacaggcaggtggcaccatactcggctaattttttgtgttttttgtagagatgcggtttcaccatgtcacccaggctggtctcaaactcctgggctcaagtggtgctcccgccttggcctcccagagtgctgggattacaggtgtgagccactgcacccagcctgtacattttccttgaaatcgtttttggatgtttagtcttatttccttattcagagttcacctgtttattttttttttcatttccccaatttagcctgcgtttcacccagccctagcaatataggtttgggtcagagaaattcaagcggccaggggatgctgaagatggcccattatggccgggcgcggtggcacacatctgtaatcccagcactttgggaggccgaggcaggcagatcacaaggtcaggagatcgagaccatcctggctaacacagtgaaaccccgtctctactaaaaatacaaaaaaattagctggctgtggtggtgggcgcctgtagtccaagctactcaggagactgaggcaggagaatggtgtgaacccgggaggcagagcttgcagtgagcagagatcgtgccactgcactccagcctgggcgacagtgagactccgtctcaaaaaaaaaaaaaaaagatggcccattgtggtaagccttgacttgaattagtcaccaagctagtcttatctcttttctaggctaattcttgttttttgtttggctcaaaacaaattgtttgtcttcagaacacaataaaatccagggagagtgtcctgttcttcctacagacgtcactgggacatcttattctttaattaattcagtcaactaaaattggtcaaatacctgctctctgtgccagagttataaactttgtatttgtataattgctagtagctctcttacatttcttactttatctatctggcatttgatctacctaataccttccaatatcacctcatgtccctttaccagcttggtggtttttctatagttcaggaaatcaaacaaaatggtgtgtgacctggaggtactagaaaaacaatagcaaaccaactccaaagccagcagaagaaaacaaataaccaaaatcagagctgaaaaaaattaaaacgtgaaaatccatacaaaagatcaatgaaaccaaaagtttgtgattcaaaaaaaaaacaaggttgatagatcactaactagattaataaagaaaacaagagagaagatcgatccaaataagcacaatcagaaatgacaaaaatgacactacaactgatgcctcagaaatataaaaaatcctcagagactgttataaatacccctatgcacacaaactagaaaacgtagaagaaatggatagattcctggaaacacacaagccccctaaaattgaagcaggaagaaattgaaatcttgaacagaccaatagtgagttctgaaattgaatcagtaatacaaaacccaccccaaaaagcccttaatcagatggattcacagccaaattataccagatatacaaagaagagctagtaccaatcctactgaaattatttcaaaaattcaaggaggaaggactcctctctaactcattctgcaaagccagcatcattctgataccaaaacctgggagagacacagcagaaaagaaaacttcaggccaatatccctgatgaacatcgacacaaaaatcctcaacaaaatactacaaaccaaatccagcagcacattgaaaagttaattcatcacaatcaagtaggctttattcctgggatgcgaggttggttcaccatacacaaatcaataaatgagactcatcacatagacagaattaaaaacaaaaaccacaggataatctcaatagacacagaaaaggcttttaacaaaattcaacatcccttcatgttaaaaaccctcaacaaattaggcattgaaagaacatacctcaaaataataagagccatctattattcaactatccacagccaacatcatactgagtgggcaaaagctggaagcgttcctcttgagaactggaacaaaacaaggatgcctactctcaccacttatatcaacatggtactggaagtgctagccagagaaatcaggcaagaaaaagaaataaaagacatcccaacaggaagagaggaagtcaaactagctctgtcacagtgcaggcaatataattctgtacccagaaaacactgcagaccctgctaaaaggctcctagaactgataaacaacttcagtaaagtttcaggatacaaaatcaatgtacaaaagtcaataacatttccacacaccaataatgtctaagttgagggccaaatcaagaatgcaattccatttattttatccttttgaataaaatacctaggaatacagctaatcaaggaggtgaaagatctctacaatgagaattatgaaacacactgaaagagatcagaggtgatacaaacaaatggacaaatattccatgctcgtggataggaagaatcaatattattaaaacagccatagtgcccaaagagatttttagattcactgctattcctatcttaattagcaacatcattttttcacagaatttaaaaaaaaaaacctattccaaaattcatgtggaaccaaaaaacctgaatagccaaagcaatcttaagcaaaaagaacaaagccggtggcatcacactgtgtgacttcatactacactacaaggctacagtgaccaatacagcacagtccaggtacaaaaacagacacgtagaccaatagaacaagataaagaaccagaaataaagctgcacgcctacagccatctgatctttgacgaagttgacaataacaagccatgaggaaaggtctccctattcaataaatggtgctggagcaactggctagtcatatacagaatattgaaattggacccctccttttaatcatatacaaacattaactcaagatggattaaggacttaaatgtaagacctaagattacaaaaaccctagagaaaaaaactgggaaatactattctggccattggccttggtaaagaatttatgaataagtccccaaaagcaatggtaacaaaaacaaaaattgacaagtgggacttaattaaactaaagagcttctgcacagcagaagaaactatcaacagagtaaactgataaccaactgaataggagaaaatatttgcaaaccgtaaatctgaagaatgtctgatatccagaatctataaggaacttagataattcaacatgcaaaaaaccaccccatttaaaaatgggcaaaggacatgaacagatacttctcaaaagaagacatacatgtggccaaaaaatatatgaaaaaatgcttaacatcactaatcattagataaatacaaatcaaaaccacagtgtgataccaactcacaacagtcagaatgcctgttattgaaaagtcataaaatagactgggcatgtggcttatgcttgtaatcccagcattttgggaggctgaggcaggaggattatttgaagccaggaggttgagaccagcctgtgcaatgtagcaagactgtgtctctacaaaacatcaaaataaatggaaaaaaaaaaagaaaaagaaaaagaaaattaactgggtatggtggcgtgtacctatactctcacctactgggaggctgaggtgggaagattgcttgagcctaggaattcaaggctgcagtgagctataatcacaccactgcactccatcctgggtagcagaacgagaccctgtctcaagaaaaaaaaaaaggcaaaaattaacatgttggaaattagttcagtcactatggaatgcagtgtgaagatttctgaaagaacttaaaacagaactaccattcaacccagcaatcccactactgggtctatacccaaaggaaaataaattgttctacaaaaacgacacatgcactcgtatgttcctcacagcacaattcacaatagcaaagacatggaatcaacctagatgcccatcgacagtggactagataaagaaaatttggtacatatacaccatgaaataccacacagccataacaaagaacaaaatcatgggggtttttttgcagcaacatggatgcagctggaggccattatcctaaacaaattaacacaggaacagaaaaccaaataccacatgttcttatttataagcaggagctaaacatcgggtaaacatgggcataaagataacacggtagacaccagggattactaaagaagggaggatggaagcaggtgtgggttgaaaaactgcctattgagtaccatggtcactatgtgggtgacgtcagtatcatgcatacatcaaacctaagtgacatgcaatttacccatgtaatgaatttgcacatgtatcccttgaacctaaaataaaagttggaaaaaaataaaagataagatatcccgtatcctcaataaaaataaaagtggcgtgtttgtgcacttgactttgtaacatgttttccaaagatgtctttgagtcataaaaatgggaaatacacatgttggtttctctagtcatcacttgacaacttacatgttttacctttcttatgatggtctgtctcatttcttcagtgacagggctagacattctgttttaaactcttcccacagctgtatattattcaacacaactttaacagagttcatagagtggagattgaggatgtttgcaaagttaaatcatttatttttattttttcttaaccatgtcccgcctgctttattcattattaagaacattgatgtgaagattaaatggttttctctatttttatcttcaaacgatctctatttgtggcttctgcacattgctagatttattccagccacttacactagggtcatagtttagcttcagctcggagccaaatgccccacagctgaaatgaccgcacctctgaagtggcattttcccaggccatgcctccctttaataatgagccagccagggggtaaatttgtatctcattacaacagagccttgtattaggcctggagaataattaaatgtgaggaattataattggttccctctttgaaagctctctcagcaccatgtctacacttaagccattacttttatttttaatctaatggtttgccgctctctctccctctttctctctccaaattaaatatcaaccataaaagaaaccaaggaagtccagaaatctgtggctttaaaaagactggatctcgaaaagattttcacaagacgcttccgaaacagacgtttgagtcggaaaccttggagtgcagtgaacccgctgctcaggtatttcctgtcaacaaacatggttaccaggttactgggctcttctgcccagggcatgctgtcagttttacaaactagaataaacgatagacgcatagaaagtttgagtaggaggaactttaccatctgagtcagtgattttttttttcaaacttatttgtagctgtagaaattggtgttcaaatgaaaacccagaaacccaatgattaaaatagaaaaaagtggaaaagctctaactgggggacagagacaccttgggcccatccctacgacagttcctgcagagactcttggtgcccctaaggcaaactacagagtaatgaaaagctctatgctgaggccagaatacctgcattctcctagtgattctaccatgtactaactctctaacttcaagcaggataattaaacttattgggcttcagtttcctcccctgggaaacaaggatggtaatactaactcatgaggttatttgagtattaaatgagttaatatccataaagaattagaataatgccaagtacacttagtgcctagtcaatgctggtcactgttattgttattgtcattattctttttcttttttttttttgttgagacagagtctcgctctgtcgcccaggctggactgcagtggcacgatcttggctcactgcaagctccgcctcccgggttcacgccattctgctgcctcagcctcccaggtagctgggactacaggctcccgccaccacgcccagctaatttctttttgtatttttagtagagacggggtttcaccgtgttagtcaggatggtcctgatctcctgaccttgtgatccgcccgcctcggcctcccaaagtgctgggattacaggcatgagccaccacgcctggccagttgtcattattcttataaagtaattacagtttaaaattcaagttaaagtgtacatattgtgaaatgagcttttaacactattctgtaactaattttttaaatgcctggggtcatttgaagaactccagcaaacactctaacaaatagaagacagaaagaaagcaagccttcatttgcataaaacggccaaagaacaatagccaaataaattccatgtttccaaaagttaagctctatacacctatgctcacagcagcattattcacagcagccaaaaagtagaagcagcccaagtatccatccataatgaatggataaacaaaatgtggtcgccaggggctgggggagggaggagtaggaagttattgtttaatgggtagagtttcggcatcccaagatgaacagcattatggagatggatgctggtgatggttatactgcagtgtgaatgtgtttaacactactgagctgtccaacctgcccattttatagatgagaaaaataaaattgagaagaaaaaatttgttcaagtttgcacagaacttcttgtaaactaatatagttttcagcttccatgtgtcttcataatacaggaatctcaccatgctggaaatgattcgaggtttttaaataatactaatttttcagacaaggtggtccccctaaagcaaagcccactacttacttggagcttcacagtagaatcagccatcatttccagcgctaaatatgacaggcttactgagggatagaatacctggatgctctgctctatgggagatttaaggaatttttcatcagtaattttgactgaattccattttcaccctacatgctgaccaattaaattgttcctcttaatgttagtcagatagaagccacggtaggtatttcagcagaagaaatttaacacagggaattgattaaaccggttttggaggtctgagagaaccaaaagggaaaaatggaggctatcctaaaatcgtcattatgggaaacagcacaccagcctggggctggggtatacggcagtggttctccacttcagcttcatcagaatctcccagagggtttgttcaaatataggttgctgggccctgtctgctggaatttctgattcagtaggtctggagggtgaacctcatactttttaattagcatttcctaagtgatgctgatgctgctggtcccaggaccacaatttgaggactgcaggtctaggggaagatcttggagttgtcagaacgtagaagctcagaagaggagcctgagagcaaggactgaaatccctgagaaggtactgcccagctggtggtgttgtctcaagatctcagagggaaaaacctcatgaagcctggactcacgcctcacaggaggagaaattgcccggctggtgctggtaccttcaaggaggtaagataagggtgattctggaagtaccaaaagaacctgaaggctagaaccagctgtcactacgaaggtgagaggaatagcaagaggaaggagccaggccctttgacctccttgaaccatccggtaaccctgtagtgctccctattgacagaacctaaagggagcagcagacacagcggaaatatgatttgctgacctagcatcaaagaacaaggcataaaagggtgaatttggagcccagaaacaataggtgaagaccagcgtacacacaaagcacacgctttcctgcagcatactagcagagaactcaagtcactgtgttgtgtgtggttttttttgttttttttttttttttttttttttttttttttttttttgagatggagttttgctcttattgccaggctggagtgcaatggcatgatctcggctcactacaacctccgcctcccaagttcaagcgattcttctgcctcagcctcccgagtagctgggattacagacatgcgccaccacgcctggccaattgtgtatttttagtagagacagggtttctccatgttggtcaggctgatctcgaactcctgacctcaggtgatccacccaccttggcctcccaaagtgctgggattacaggtgtgagccaccgcacccggcccactgtctgtgtttaagagccaacttgatcatatgatccagcagtctcactactagatatatgtccagaggaaaggatatcagtatatcaaagagacatctgcactcccatgtttattgcagcactattcacagtaaccaagacgtggactcaacctaagtatccatcagcagaagaatggataaagaaaatgtggtatgtatacacgatagaatactattcagccataaaaaaatgaagtcctgtcatttgcatcaacatggatgagtctagaggataagtgaaataagccaagcacagtaagactaatactgcatgatctcacttatatgtggaagataaataagttgatctcatagaagtagagggtagaagtggtaactagatgctgggaaggatggatggagaagggaatagagaggttggttaacggttacaaaattatagctagataggaggaataagttctagtatttgatagtactgtaaggtgactagaattaataataatttattctgtgtttccaaatagctagaagaaaggattttgaatgttcccaacacaaagaaatgataattgaggcaatgggtacactaattaccctgatttgatcattacacattgtacacaggtattgagatattacactgtattccataaataggtacaactattatgtgtctattaaatttttttaaagagccaaattgtacaaaagttgtttgttttgaaatattggaataatactcatcatggagagaatctcagactgcgagatgacagcaatgttttcaattccactctcattcttgtgcaccttcttattgagtagaatggtgaggccacatagctagatttataaaatttaaacaagtatatgataagattccttggtacacgtagattttataaaaattagattatattatgcataatattgcaaaacttcctttttcatattagcaatatactgtgattatctttctcttccaattaatacgtgttctttcttttttagagacagagtcttgctctgtcgcctaggctggagtgcagtggcacgatcttggctcactgcaacccctgcctcccaggttcaagtgattctcctcccttagcctcccgagtagctgggactacaggcatgtgccacgacacccggctaattttttgtatttttagtagagacggggtttcaccatgttagccaggatggtcttgatctcctgacctcatgatcccccggccttggcctcccaaagtgctgagattacaggcatgagccaccgcacctggccaggttctttcttttaatggctacataacattctattttatgaaagttccaaaatctcttaacacttcctttttgggggcatttagtttacttctattgttttgctatcacgaacagtgtttcagagatgcccttgccctcacattcttgcacacttgccagttataccctacggataaattcttagaagtgaaatttctagattaagggatgagtaatgttagatttttttacttatatgtatcttgatatccttttaaataaatttgggaaattaaagtcattttccttaaactcttataaattttaagaaaaacaaaagtattaataatcgaagtgttaatattgattatttctagcacattcagtttggggaaaatttatgatctagtagagtagtacttttgtgaggtagatgtcacaaaaaatgtgtagtatggagaaattgtccagtagtatgtccatttagtagaattttgagaataacattttgccataaattttatagatatttaccattaatccatttgtagtcctacaacatatagttgattacagttatacattttttgctgagtctttggttcaaagcatgcagttcccaattacaaagacattcctaatggaataaaacatccactttgtgactgatttaaggttgttttcttaaagcacaccgcagccaaaagtggacacagcttgaatagcaaattttttcctttttgttgttgttgcttcatccaataactgttaccaaattcccgtagaaaagtgttgcccactcccacatcgacctttggaagcataacattcagctttggtgtctatacacaatttaatttggaaggctcctcacaaatcatcttattttccagtttcaaaaaccaagttctgagtggagattaagacagggtctctttatttcccagtgcagtctcctatctatttatttgtgaatgaatgaattagttaattaatgagccagggtttcactttgtcacccaggctggattgcagaagaagtcatcgtggccaagcgtggtggctcatgcctgtaatcccagcactttgggaggccaagacaggtggatcacttgaggtcaggagttcaagaccagcctggccaacatggtgaaaccctgtctctactaaaaatacaaaattagccaggcgtggtggcgcgtgcctgtaatcccagctactcaggaggctgaggcaaaagaatcacttgaacctgggaggcagaggcagcagtgagctgagattgcgccattgcactccagcctggccaaaaaatgtgaaactccgtctaaaaaaaaaaaaaatccaatctttcctattggctttattaaatacactttaactttagaagcttagaagcacaataattagaactggcctaactttaaaaaaaattttcacaaagaaattagtaacttgtagggtcatttgtaatctttttctctgttgatttttacagttttaaaaagttaatacaataatttatttacttattttttgagacggagtctcgctcttgttgcccaggctggagtacagtggcaccatctcgggtcattacaacctccacctcccgggttcaagcgattctcctgcctcagcctcccaagtagctgagattataggcactggccaccatgcccagctaattgttttgtatttttagtagcgatggggtttcaccatattggccagtctgatcttgaactcctgacctcaggtgatccgcccacctcggcctcccaaagtgctgggattacaggcatgagcccaatattttaaaaatagtacattattacagaagctagatgtgcactttaaattattatcagaaaattagtatgacagacaaattctatgattgtcccatcatctgggcctgtgacattcacacctttgtgatgttcatccccgactgtgggtgggacctgggacttgcttctgtcaaaacaatatggcaaagcatgagaggatgtcacttgtgatcatattagatagcagccaaaatggattaaagacttaaatggggccgggcgcagtggctcacccctgtaatcctagcactttgggaggttgatggcggcggatcacctaaggtcaggagtttcagaccagcctggacaatatggtgaaaccctatctctactaaaaatacaaaaataaccagatgtagtggcggacgcctgtagtcccatctgctagggaggccgacgcaggagaattgcttgaacctgggaggcggaggttgcagtgagctgagatggcgccattgcactcaagcctaggtgtcgcagcaagactcggtctttaaaaaaaaaaaaaaggtaatcatacctcactgcagccttgaactcctgggcggggttcaagcagtcttcctacctaaacctcccaagtagctaagactgtaggtgcacgccaccatgcctggctaagttttgcttttttttttttttttaagagactgagtctcattgtgttgcccaggctagtcttgaactcccggcctcaagcagtcctcccaccttgtctacccaaggactgggattaaaggcataaaccactgcacctggcccagtctcctttttgttacaacttcctccagctctgttttgctctggtgtgagacatgagcatggttcattaagaggcttggcccccccagccccaggaaagaacaagccaacaaccgataggaatgtagtactgtttttagtcctttcctcaggactggtttgtctgcataagatgagtaactacctgcttccaggtgagaagaagacatttaattttagagtagtccagccaggaagctgagatgtcattcttatcaaatccgcagtttcttcagaagacttgaggcctggctgagattctgtagtcccaaattggagcagtcttgagacatccaagattcttcggttctcattttagacttgccgtctctctcacaaagacccactgttttctctcacaggcaggcccccgccacttaaacgtgctgtgcgacgtgtctgggaaaggccccgtcactgcctgtgactttgacctccgcagcctgcagcctgacaagcggctagaaaacctcctgcagcaagtgagtgccgaggactttgagaagcagaacgaggaggcccggaggaccaataggcaggccgagctctttgccctttacccatcagtggacgaggtgggtgccactgtttccatactggagaatctcagtgaagactctgagagtcatgtggacaattgtgttgttcattattactatatagcagcccatggtgtcagggctcacttgtatgatttctggggcctcgtttttcactcaggcaagcctgtgtgtcatagcagagccattattgattatcacacagatgggattctgataataataacaactggaattttcatagcactttacaaaatatgttcactaagagcatctcatttaatccccaaatgtttcaagggtctacatgtagtaatcacacccagcaagtcaaaccatcctattatttgaggggatgtgtggtcactaatccattgagacatacattacttaaactttgatgttctttagtgctttgttactttctttttaatggtctctatgagcaaccagagagacctgctttgaaaacatttcaggctaggataatcacagcccatgctcccaatgtatagaactttgggatcttgattgtttacttcttcatttattggagctgactgacaacaataggataatgtagactttgcctgtggtcactgcctgaggcactttggatgaaatgagaggtgacgattattcaagccttttgtctgtttgaactccttatactgtataggaggctctcagttttcccctctgcgtgaggttatctacacttctgggtcttgccagaacagattactgctatatctctgctgtccaaatggtattgaaagttcagttggaagaaacaggatttgaggaaactgcataaaagatattctatccatccatgcctctaaatatttgaaattcgatccttggattaagtgagacaatcagagagcctgatacccccacccttctggattgtgtttgctaacctgcccttcagtgagctcacgactggtcagcaaggaggacaataaaggaaacagcagtcatgagataggatatcacgtccacatggaaatactattgttgacattgacctactcaccatctagcaccttcctctttgatgatctaaagggcaattagccttcacatcttccgagaaagaagaagcacgcttctgctgagataatacaaacacttagagattgtgctcattttgtaactaactctcttaagttctttacttagagcaaacttctgtccaccttcaccaaatgtggcaacttaatgattggggtcctgaatttactccagctttcttttcttttcttatcctgattttctaagcaccttggtttcctcatctatttttattttatttgcagtttttgtcagcagcctcaaatggtcttctgaatgaggcagaatataaaaataaattatctcacttatatatagaatctaaaaaagtggatctcatagaaacagagtagaaaggtggttatagcaggggctgtggggagagggagaaggtgttggtcaaaggccacaaagtctcaggcgggaggaatacgttttagtgacctatcgcactgcacagtgaccagagttaataataatgtgttacatatttcaaaactgctttaaaaaaggatttttaatgttctcatcacacacacacaaaaggtaagttggtgaggtgatagatatgttaattagcttgatttaatctttctacaatgtatgcatagatcaaaacattacttgatttaatctttatacgatgtatacatagatcaaaacatgacactgtaccccatagatgttcacaattactacttgtcaattaaaaaataaattaataaagtatgaataatgtgagcaatatcatcatctcctttcctcagattaaaaagcaacaattaggctaaagagctttttcaagattcaacagataaattaaattacaaaatggggccctaacccgctaactacaaagttcgtgttcccttgtttatgtatctacatacatatgactacctggtatgttgggacacataactgaaatccaaatatgatatttttaaatatcatgtaactttttagtttccatccacgacattaagactttttaccagatttgtcaaaacatattaaatcagactgatttggcctttactttccttcctcttcctctcagttctgtgatggagatgccaacatgtaatagagggacccaaagtggatgccagaagagagagaacaattaaaggatgcagagaatatgtccagtgagacgtttgcttgtcagtgtctccctggtggtattagaggggagaatgttccatctgaacagattaaaataatgaaacgtagcctggttttagaggaactttgttttatgatctttgaaacaatgcagacgctccattgggactgaatgttataatctgggagcaggcctaatggggcctgcttttattgagtagagagaagtgcttcgtaattagtgttgcagttatttgtaaactggcgtgtctaaaatgcttgagggcctctataccagccctttaatattttgaagctgttgtcacagaaattgcatttgtatttataatttgtgctttctccaaagaaagttctatggaagaaaggtaaatttctgcctactctgacatgattacaaatgctggttttttcgatgacacaatcagatttttaaatatatcattacttgatttccctgtaaggaaagttagaagagaggtaaactagtatatccaagttatggctgagtctacaggagaagcaaaagttggacttaaccaccaagcttctataaggcaagttctttccctaattcattctgagtctacaaaaggcggttattctacaaaaggcattctatgtcaatccctaagaaagattccactgatactccaaattatagaaaagtttgctgaggctgttggttacaagtgacagaacccaactaaaaccaattcagaaaaaaaggctaggggagtacttcttggctcacctaagaaaatcacaggtaggcaaatgtggagttgacctctggatccattgggagagtaaatgaaagaatatcatctctctcatactgtctctttctctctcattatctctttcattccgttcatttatatatatttttaggatgatgaaaacaagaggtatccattaatgtttcacatttccactttctgtttgcttgggaattagttgccatttcagttagctataaagcctgaggaaattcatatagcttagaagagactgaggaaatatatcacccaaatgtcatatgtggaccttgtttggatcttgatttaacaaaataacagtaaaaacaaattgagacagtcagggaaatttgaaactgacaaaaattatttagtggcaataagaaattattaatttttaggcataatggtattgctgtatgtttttaaaagtctttatcttttaaagatatgtactgaaatatttatatatgtatatggtctctgggaagttgcttctatgtaatccagtattgagcgagaaaggtggtaagtgggtaaatagatgaaaccagaatgcccctgaattgaacttgttgaagctagatgatgggtgaatggttcttcattgcattgctctctcaacttttgtgtatgtttaaaattttcccaatgaaaatcttttttaaaaggatttcaaaaattagaatctagaccaaaggcagtcccagaaatccatgagtgtctctaccttcaggttgttttccagttagggagatcttccctttagatatgtctgttccaatgatcctaaaaggtccagattgccctgagcgagtaggcatcaaaacaatgtctcctctgaaataaactcagccattccacccagcaacatggccaaccgccgtaaccacaaggaatggggaccacagggagaggttggagtaatgatgagcttaccacattgatcattccatcaaagtgggtacatatttaccaggaaggtgactttactgctatttgcaagaatgttaagcttgctgtggggtattcactggaaagctcccaggaaaagacagtgagatgtgaccctgttctttggacccttgcgatgggcagagcactcaccagtgtttggaaagcatactgcaagagtgggaattactgttttcaaggatttgcactacttatttttgcatacatgaatataattaacatagaatgatagttcagatacagatgttaaggttacaataggggcttgatatttctctttaagtgtttagtttctgtgcggtaaaataaacaggtagagctcttaatttgtcattactaaatttcatatacctagcactttaggaagctctaactgcataagcctgtctagaacttgtcaattcaaccccaagtctctatcatctgtttaagaaaacagtgaactgagaaagtgactctgtattataggatcaatggtttacagccttaagtgaaccattctgactcagatttcaaatctgaaactcacatacttactagtaaagcccttgacaggagaaatattgcaaatgtgtaattagagtgggcaaaaaacacacaaaaacatcaacaataggtataagattttgcaatgccatctggtggatgttactaagccatatccatgttcacatttccttccttcctgcttcagtctctttgtcttgaatgcttgggtttctaaaaggagaaactgttttgctgcaaatgctggctttgaggttgggggttggaagagaaactttcttataaaaggcagagtgttagaaaaaaagcaaatctaagttaacttgagccgtggagggtagccttcccttccctgggttaactctaattggagctccccacagaattcactaatgatttccttacgatgtgattaaaaataggaggatgctgtggaaatacgtccagtaccagaatgtcccaaggaacacctgggcaacagaatattggtcaagttgctgaccttgaagtaagtatcaacaaacacactgccaccgctttgagatttatcttgccttttacatacaaatgttgtgtttattatcagagcttgaatcaaagcggagctcccaaaatacgtctaacagtgggcagctgtggagtagtagaaagggcacgtttgagtccattcctggattttttttctaccaacttcttgatggtcattcttctacaatagagaaggcaaacacacgtgtctactaaagttaggcaggtaaggtcattgagtgaaatgacctacattaagaaaaatagcgcttaagtcagtggtgtgctggagtcgactgtactaactcgtgagatctgacagtgcatatctcttcctgggttcggtgaagtcacattggtaactttaaattggccatggcgaaagtatttacaatgtagaaatcagccaatgctacacgtttgcaccaccctcagcacccggagattatttgtaaaacatttaccagtatgccactgttgaaacacaatgataaatgcaactgaaactcagtgccaggggacaatagggagtggtgaggactgtagtaaactatgttaagggggcactcactgctagcaacagactcttgccatccaaataaacaggcccatttttgtcaactgtcttttctattttttcaagagaagctgaaaacccagatttttctgcataatataccgactccctaaatatgttctcattccctttataaacaccatataattaaaacacgactacagtctggtttcatcttgtgggccaattatttgccacatctacttcaaagtagttgcatccaaacgtttcaattgtatactatgatagcaaaaaaaaaaaatcctctatagacatgtattaattttgtactttcatattaaaatattatctacattataaaacataatagaaattttaaagatgaactagataaatctatataaattctagtattttcttcttccactgcaatagattgtcttgtgtaccctcggagtgcctccatacctctcttcgtctctgcagactgctattttcaagaattagttctccttcaaatccacagatgaaaactttaaagttgtacatattttacctaagcaaaactacagaagcgtaacatttatttatatactattagatgggtcatccatctctcaaagtcacttcataggtcccttcagcggcccctggtttgcagtgagaaggcatctggattctggatgtaaggctgggtttcaacccctgggaacttccctgggattttgagttcttccctataaatgaagttgatagaccttatggtctcaaaattcctacctaccacaaacttctatgattctaacgcatagcctctgccaacttcttctgcctcagaaaacaagccagcaagtctgctcacacagctatgggtggtctcttgatattatagtctcctcccgctggccagttctaccagagggtcttcagggccttttgtacggagaaatgagcagcccataaaccagctgagtgtcaagtaatgggcacagaaaagcaagctcttgcccttgcaaaccaacctggcagtgggagcttcctcatctgtctggttggcgggaggactgagtggaagtggctcttcccctctgcattgtttaggaagccttcgctattgtctgagggacacacctgccccgacaggatgcatcatcaggctacttttagatgcagcgactatgtcatttgagatggcagaaattctcctctatggtgctcatagccaagctttctagacctctccagtgaatgagaggcagctgttctcacaggtgggaaaacatggtcactaagagagatatgtgttattttaaaaaaatgttaatggaggccaagtgtggtgactcacacctgtaatcccaacactttgggaggccaaagtgggaggatcgcttgaggccaggagtttgaggccggcctgggcaatatagtgagaccccctctctaccaaaaactaacagatgtgttaatttttagccctagctacattgggaggctgaggtggaaggatcgcttgaggccaggagttcaaggctgcagtgagctatgatcatgccactgtattccagcctgagtgacagagtgagaccctgtctctaaaattaaaaaaagaggagtcacttgaatatctcttaatgaaaattgtaaagtgcagtttctagtgatgtccccgcaactgccaaagcagaaattaagtcgaattgacatatttgccaggtgcacttggcctgctcatgtgttttaaatagtatctatactaacctataactgcaagagaagagatagaccaaaaagacagccctccgagtaactacttagagtaaactagatgaaagaaagaaacaaattcttataggtaagcctagaatgtgacagtatgaatagtaaaaatataagggtaatattaatggcaaatgttttcccatttacattgatatgtaggattctattcataatactacatgttttagcccctgaggaatttgtttaaagttgtagacatctgtaactgtctctgtattgcttttcagaaatatagaaaccctcaaagatacagagagaattagggtcctgccaattctgcaaatgtttgtaacagaaaaaaaaaaaaagaatgacaacaaagtatttttctgttttgtgttttaaatggagaaatattttaagatttaataccatcttatgaaaagtaatctcagctcttaggagtcttcttgatggtgaaactttaatgtgcagaaaatttgcccaggcagtttcttttaaatgcagattttggaggaccttccataacaatctccctcaagagattctggttgagtaggtctcaggtgggatcaagaaacctgcatgctggctaacttcttttgcttcaaaatgctagattctggggactacacttaaagaacaaacactcacggaaaaagcccaggttctgtgatcagagatggctgggctcaaaacctgaccgaacactcacggaaaaagcccaggttctgtgatcagagatggctgggctcaaaacctgaccgaacactcacggaaaaagcccaggttctgtgatcagagatggctgggctcaaaaccggaccgaacactcacggaaaaagcccaggttctgtgatcagagatggctgggctcaaaacctgaccgaacactcacggaaaaagcccaggttctgtgatcagagatggctgggctcaaaacctgaccgaacactcacggaaaaagcccaggttctgtgatcagagatggctgggctcaaaacctgaccgaacactcacggaaaaagcccaggttctgtgaccagagatggctgggctcaaaacctgaccgaacactcacggaaaaagcccaggttctgtgatcagagatggctgggctcaaaacctgaccgaacactcacggaaaaagcccaggttctgtgatcagagatggctgggctcaaaacctgaccgaacactcacggaaaaagcccaggttctgtgaccagagatggctgggctcaaaacctgaccgaacactcacggaaaaagcccaggttctgtgaccagagatggctgggctcaaaacctgaccgaacactcacggaaaaagcccaggttctgtgaccagagatggctgggctcaaaacctgaccgaacactcacggaaaaagcccaggttctgtgatcagagatggctgggctcaaaacctgaccgaacactcacggaaaaagcccaggttctgtgaccagagatggctgggctcaaaacctgaccgaacactcacggaaaaagcccaggttctgtgaccagagatggctgggctcaaaacctgaccgaacactcacggaaaaagcccaggttctgtgaccagagatggctgggctcaaaacctgaccgaacactcacggaaaaagcccaggttctgtgatcagagatggctgggctcaaaacctgaccgaacactcacggaaaaagcccaggttctgtgatcagagatggctgggctcaaaacctgaccgaacactcacggaaaaagcccaggttctgtgatcagagatggctgggctcaaaacctgaccgaacactcacggaaaaagcccaggttctgtgatcagagatggctgggctcaaaacctgaccgaacactcacggaaaaagcccaggttctgtgatcagagatggctgggctcaaaacctgaccgaacactcacggaaaaagcccaggttctgtgaccagagatggctgggctcaaaacctgaccgaacactcacggaaaaagcccaggttctgtgaccagagatggctgggctcaaaacctgaccgaacactcacggaaaaagcccaggttctgtgatcagagatggctgggctcaaaacctgaccgaacactcacggaaaaagcccaggttctgtgatcagagatggctgggctcaaaacctgaccgaacactcacggaaaaagcccaggttctgtgatcagagatggctgggctcaaaacctgaccgaacactcacggaaaaagcccaggttctgtgatcagagatggctgggctcaaaacctgaccgaacactcacggaaaaagcccaggttctgtgaccagagatggctgggctcaaaacctgaccgaacactcacggaaaaagcccaggttctgtgatcagagatggctgggctcaaaacctgaccgaacactcacggaaaaagcccaggttctgtgatcagagatggctgggctcaaaacctgaccgaacactcacggaaaaagcccaggttctgtgatcagagatggctgggctcaaaacctgaccgaacactcacggaaaaagcccaggttctgtgatcagagatggctgggctcaaaacctgaccgaacactcacggaaaaagcccaggttctgtgatcagagatggctgggctcaaaacctgaccgaacactcacggaaaaagcccaggttctgtgaccagagatggctgggctcaaaacctgaccgaacactcacggaaaaagcccaggttctgtgaccagagatggctgggctcaaaacctgaccgaacactcacggaaaaagcccaggttctgtgaccagagatggctgggctcaaaacctgaccgaacactcacggaaaaagcccaggttctgtgatcagagatggctgggctcaaaacctgaccgaacactcacggaaaaagcccaggttctgtgatcagagatggctgggctcaaaacctgaccgaacactcacggaaaaagcccaggttctgtgatcagagatggctgggctcaaaacctgaccgtgccagtccctaactgtgtagactttggcaagttccttattccctgggaaccttgctttcctggtgtgttaaatgcagataatatctgcattacgctgtagttgtgtaaagagactgatgtgtggaaagcacttattataacacaattttaagtctttaataaatgtcaattctctttttctttctcggaaccacagaggacttactactcagtaccaacctaagtatatcacagcaatattcaggccctttgtgtagtagggagtaaacaattaaatatagattgagcatgccaggcagcagctggtgagcctaggcccaggaaagcctccaattggcctggtgcagtggctcacacctgtaatcccagtactttgggaggctgaggcaggtgagtcacctgagctcaggagtttgagaccagcctggacaacatggtaagaccccatctctactaaatatacaaaaattagctgggtgtggtggcacatgcctgtagtcacagctgctagggaggctgaggccgaagaatcgcttgaacctgggtggcggaggttgcagtgagccgaggttgcaccattgcactccaccctgggtgacaagagcaaaactccatctcaaaaaaaaaaaaaaagaaagcccccaattaatgtgcaattacctaataatagaaagaataatcatagaaatcctcaacactgggcttttcggtggtaaaatgtatgtaacataaaatctaccatctttttttttttttttttttttttgagacagagtctcactctattgtccaggctggagtgcagtggcatgatctcggctcactgcaacttctgcctcccaggttcaagtgattctcctgcctcagcctcccgagtagctgggattacaggcacttgccaccacgctcggccagtttttgtggtttagtagagacagggtttcaccgtgttggccaggctggtcttgaactcctgacctcatgatccgcttgcctcggcctcccaaagtgctgggattacaggcatgagccactgcgcctggccaaaatctaccatcttaaccatttttaaggtacagttcagtggtgagtacattcacattgttctgcaaccatcaccaccatccatctccaggaatttttctcttcccaaactgaaactctgtacccgttaaacaataactccttattctccctactccccagcccctggcaactcccattctactttctgcctctatgaattttactactctaggtgcctcatgtaaggggaatcatgaagtaactgtctttttgtgactggcttcttttactcataatgtcctcaggttcatctatattgtagtatgtatcagaatctccctccttttatggctaaataatattccattgtatatatgtagcatattttgttatggcctcatatatgtatctgttcatggacaagtgggttacttccaccttttggctattgtgaatagtgctgctacttggcattgtttttaagatacattcacacacatcattatacgtgatcctcacaacaaccaggaaaatggaaaggcaagcatccttaccttattttgcagataaataaatggaattcagaaaggcgagtaacctgattagggtcgcagaattagcagatggtggaggaggaacagagtccaggtctctgcctgggtgccctgggagtctgccatgattccaaattgcctcatttccaaaggcgccatttgagcaaataaccctttttgtctgtgctcatattctgtccaaatattcttctaaaaagtcctcttttgagacaaagctatccattgatgaggacatcctctcacacatacctggagacaaaacatgactttattgacatgatgtctgaggtaatggtggactggggcccttttcctggtgctctctgcaggtaacatccaaagccatgggacatcaagctgagaaacttggaagaccttcaccagtgttccatgtgcacctgtaatgtccaccaagatactaaaggcaaataatgcaccaggattatgctttgggattcaccgtttcgaggggaattggcaattagggccaatatgagggctcatctttctagctctcatggggcccaggcacctcagtgtttatctgctgtgctcaagcccctccctgacctcaactcagcaactccccagtaatggagttaggaagggccagacattcatccccatcaaaacccagccttcttctgactgtcccactacaaatctaaggaaaagcaattgaacttttcttttgttgccatctgaaaagccccattccttagaattgaataatacagattctatcctttaaatttttttatttcaatggctttagggtaagtggtttttggttacatggatgaattgtatagtagtaaagtttgagattttagtgcacccgtcacccaagcagtgtacattgtacccagtatgtagtttttttatccctcatccccctctactctcctgcttctgagtctccaaggtccattataccactctgtttgcctttgtgtactcatagcttagctcccactaacatacagcatttggtttccattcctgagttacttcactcagaataacaacccccggctccatccaagttcctgcaaaagacattaattatttccttctattttatggataagcagtattccatagtgtatagataccacattttctttatctactcattggttggtgggcaattaggttggttgttggttccatatctttgcagttgtgaaacagatactatctagcaataaaatgtgaaatgtgaacaagtccattacctcagacagaaagtctaccctctgaaaacacagtagttacaataagaaggtgaatcacactaaaggtccattcagcccactctctcttgcagtgagtgagtgaatgagtgagatattccaaaaatatccaccatgcttttgtaatgtccaccatgatctcaaatgattaggaatttttcacaaacctcctatatttctctattaatatcccagtgcgattctcatatacttggagttttccaaatatttcgggaaactgctcatatttttaaccagtttatctatctaggtgttttcagaaaattcaaaattatctaactcaaagccacatagattttcctctctttctatggtaggttcgagattgaaattgagcccctgtttgccagcattgccctctacgatgttaaagaaaggaaaaaggtaagaaagcaaagaaaaatccatccctaaggcacatatattgttcatgattctttgcatgtatgtttttaaatttctttgcagcaagaacctatcagatttgaaagcaaatgatctttgatgagtccagttctgttgcctttgcaatttttcaagcagtggtctgagaatgtaatttatgatctttgaagaattttagagggagaggctactggaggtgctggcctggttggaatagagaaagaatgaaatagcgcatggggttatgtataaaacaaacccatttaaatacatttttaacaagcttggatgcgcatgtaaagcttcctcagtttgagagttctttgcactgtgaaataggctcatgactgaagggcatcttacatggtagaggtctcaatttgtcacagagttcagaccttaccaactgtaatgtgcttttaatgaaaacagtgaccaagacctctcgtgtgtttttaatgtttagtcattttgtgactcctagaagaggacagcaatagcaaatccagagtaggatggacacttctgcccttctttacccataatcattctgtatttaaggaaacaagcatctcctgcataaatattaataatcactgagatttgtaggataggttaactgctaaaacaagcagaacccaatctcagtggtttaaagcagtagttctcaaacttgagcatgcatcacaatctcctggaggacttgttaaaacacagattgctggacctcacccacagagtttctgattcagcaagtccaggtggggcctgagaatttgcatttctaacagtcccctgctgatgctgaagctactggtcaggggaccacattttgaaaaccgctggcctataagcaagaagttgctgtctttgtttctttaaccatccagggtgggaggagggacccctctgttccacgcagccactcagaaatacaggctggcagtggctcctccatcttcagtatgttctctccccaaattactcttgtcactgccattgctgcccctgaagaagagaaaagaaggatggaggaggcctggaagtttgatacattgcttctgctaacaattcactggagagaattgagtcacatgatcacccctcattgcaaaggaggctggtaaatgtagtctctgcctgggcagccactcaccactaaaattctcatggtgatgaaggagagaacccaaccatacagtggctcttaagtaatacgacactaagagagccaggagcactgttcacatcatgctcttgctcagaatcttcactaagattcattccctacaaccaggctttcttcatgatggcattcctctaccttctttccatccatagtctatgcagagtcaagctagaccgctgactaagcttcccccagccgttcaagcctctgagatatttattcatactctaatctctccctggcacatcatcaccttccacccctgcctatcagaatcttctaaggcccatccatctccagtgctgcttccatgaaaagttgtccttgtcacccaactgcaaatggcctgtcactctggaacttccacagtgcttctttgtatgcatgtggtgacttgtattttgcttttactgtagttagttacatgtttaccttttccctcacctttttttttttttttttttgagtcagggtctcactctgttgcccaggctggcatgcagtggggcgatcttggcttactgcaccctctgcctcccgggttcaagtgatccatcctcccacctcagcgtcccaagtcgctggaaccacaggcacatgccaccatgctggctagtttttgtattttttgtagaggcagggtttcaccatgttgcccaggctggtttcaaactcgtgagctcaagcaatgtgcccgccttggcctcccaaagtgctgggattacgagtgtgaaccaccacacccagtccttccctcattcttgattgtgaattaattgagagcagaggtcctcctcttctgtagtgaagtaactgatactcaggaaataccggtgggttaataaacatttaaatgtttcaaggaacatctctcaaatggctccagaatacctagacattgtgacaaaacatttgtcagatttatccaggagccactttcctaaaccacatctgtgattattacacttactccttcagcaaaatttctctgtggtgtttttactcctttttaacatgtttaaaccatgaatgcaacaggtctaacttatatttcactttgctgctcatttacagatctcagaaaattttcactgtgacctgaactctgaccagttcaaaggatttctgcgagctcacacgccttcagtggccgcatcaagtcaggcgagatctgcagtcttctcagtcacctacccgtcctcagacatctacctggtagtcaaggtaattcagtacgatctgatttgcccaatctgatgttttcattgctgtgttgttcccagcacatgtttggggtgcacgcaatctcagaatgtgtccacatatcctctgagattcactttgtttccttctcagtttaccccttttccgttctaagtaaactgtttcagatactagaaagactaggttttggagacacacagacctaggtttgagtcctggctttacaacctagtaattaaatggcattggcagtttcctggtctttctgagactgagtttcctcatctgtgaagtggagataatcacactgacctcagtggatagtcatgactacagaataaagcttggcacatcttgggcacccttctcctaattaaggagagttccctcagtgacctggtgcaaagaagctgctgtggagaaaggaacaaaatctctgggctagagtttcctaacgatgttcatgttgctctagagatgcatagttacgtgttcccaagtccagcctcttacaagctgaagcgtgggctgtggttttcaagtttcatcctccttttttttttttcttcttaccatgtcacagactgtctctaatgagagttgaaatctatggggcaattgtaagtagaagagcctttcattctaggctatactctttgctgttgtaagaaaaccagatcctttctctgtacaccaaaatgactggttagaaattaacaaacatcaggtattttacctaccttaggccagataattggtcttattgattcttttttttttttttttttttttttttgagaggagttttgctcttgtcacccaggctggagtgcagtgtcaccatgtcggctcactgcaacctccacctcccgggttcaaacgattctcctgcctcagcctcccgagtagctgggattataggagcccaccaccccaaaccaggctaatttttgtatttttagtagggacaggatttcaccatgttggccaggctgatctcaaactcctgatctcaggtgattcacctgtatttggttcccaaagtgttgggattacaggcgtgagccactgtgcccggccgtaaaatcattgtaaaaacaaaacaacaaattcaggtgtctgatttcatgtgcccccagcctcttaggtttggaacattatctagttagtacagtgttttatgtctgtagtctcagtgatcgccccatgatctcatggattccaaataattcaggtagctttgaggtcacttaacagatggcaaatgtcttttcactctagcttctttaacaccatataacaaagattatgagaggttactgtagcttgaggggaacttatttaagcttatagaagtatagttaaaattatattgctgaaaagacacttctattgttgtcaaacttcaatgtgtctccttttcgttgcaatattacttagacatacaggaaaattaaagcccactatgatagccctgtaggtaagttcacaattctctgtcagcctaggaaactgaagaagccaacactagttctatagagccaaattttatctcaaactctacttcccagtggatgactttctcttgattaatccgtcatattctgccaagtaacagtggttacccattggttcctatcacttactaaatatgttccaaaattttcaaatgtataaatgtgttcatttggcataacaaacatactaaagtgtttggataggtttaagaaattgaaatctactcagcaagacagcccctggttggctttctgtttgcttttctttatcgtaatgccatcattgttgcttctttccctttaaatatatagtaaatggtgttaaactatttagcacatccaggcagacattatttggtaagaggggcttctttcttttttgtttatattcccaggccgaacatcagggtctttactgtattttaggtagcatcatctagttcaggtgttgcatataatacggctttaagggattatttccgcttaaaagtttaattcaagattttgtgaaatttttttttaaaaagaatttgttttacaatcaaggaaagaagagtgaaaatgggattgaattggaaacttttcaaaaattgtttaaaaattggtatgccgtgcccaatttaaatatttcataagttgcgatgggcctatccttatgtaagggccacatagtttgagaaaacacaaagcagagagcctagcactttagaagtcttgcagatgttaaatttcccatcttaaagagtttacaatccagttaaaaaaacaacttggcattcaaagaaatgggttcaaattcctattttgctacatttgctgtgtatggtagcaagtttagtctgtcagtctaattggacaatgatccctgtgcctgagtggttttgaagaaaattgaaataatgtatgtaaaaacacctaccctgtacctgacataccataattaggtaaacaataaatggccatgaaatatgaaaaaaataggtatgccaagtgttaatcctaccccttctgaatagagcagaaagtagtctgttcccttaagaaaagttttaggttaatctgataggcttatttgccctactttccatggttatgaggagtcatgcatttcattacacacttttgcataaatcatgagggaacaaacaataggttctcatgtcggtctgcagctccttctcatgaagtacctggagttctccttgcccactgcagccagggcatagtatctgctggtctggtcaaatctgacttctcctgcttcctgtatgttccatgatacacactactagtgcatgaagccgtggcattccccttccttgcttcagggtcctaattaagaagttcttcatctctgttcagaatttattctaaagaccacatttttaatccattcacttcatggaaaaattagcttccttccaatttgttctacaagctcctgactatgagcttcaggagaatgggggcagtgtttatcgccaccttatctcccagctgctaccatatagaaggtactcaacaataagtaaacgattgctgattagcaggaatactggtcagtttctagctcaagtgttacgtgcttatgttttcagtgtggtgcatctctcagtgggattcgccttctcttcatgctgtggcaatgggagggggttttgaacttctttgatgagaagagagacttcctgcttggagtcctccctgaagcagatattcattgagtagcctcatgctgcttcctttgaaaccccataaatgcccctttatcatgggtattgttaaatactttgtgcctaactcacagcacctattaagtatgtgtcccttttgtactgtgttgacccaaattctttcttcaaggatcatctcaactgatgggactaaatccactggttttactcttcaacatctaagttaaattttttttgagcagagagttaggaaatttcaaatttctccttgtctttcttttaaatatggtgcccaaatttatgacaactggccagccagtcactttacctgaagcaagacagaagacacttcattcattcttattaccagcattcattcctatcaacagccagttagcaaagcaagaagctgcacatcccaatgcttttgagtttctttccaagtctgttaaatccagagaattagccctgataggaattacaagggagacaattacagataatttattcggttcagtcattcattttgtggaaggttttagtccctaacccaactttcacagagaccatatctcttttttacattgtaagcaataataaagaaaatgagttttccacttcctacgtatgtctcctgggttttgttttataaaataacttttattgctgtttttattatatacataatacatgtttattgtttaaaatagaaaatacacataagcaatgggaagaaaataaaaatcacacataatcccaccatagaaagttaactactattaacacttgctgcatttgctgagtatctactgtcacccttttaatatgcctttatgatttgttaaataaaattgtatgctattctttatataaattttttaataaaaaaatatgtatcacagatagcttcctatgtcatcaaatattgtcataaaatgtaattttgatggttgcatagattcctttttatggatgtaatttatgtgccttattttaatattctttttattggtagattgaaaaagtcctgcagcagggagagattggagactgtgcagagccctacacggttatcaaagaaagtgatggtggaaaggtatggtaatttgagtgttgttaaatggagacatcttagaagaagcaggtattttcagaagtgttacacaaatagttaatgggctttagtccctaatgtgtccctatataagacactactacattttaattaaataaaagaggaaaagaaaactggtcaccgatgatgactttttttttttttttttttttttttttgaggcagtgtcttactttatctcccaggctggagtgctggagtgcaatcacggccccctacaaccttgaactcctgggcttgaatgatcctcccccttcagcctcttgagcagctggtactacaggcacatgccaccatgcttggctagttttttatttttttttagagatggggtctcactgtgttgcccaggctgctctcataattctggcctcaagtgattctcctgcctcagcctcccaaagtgttgggattacaggcatgagtcaccatgcccagcctgatgatgattttttagagaaataaatccttgaattttctaatgttgacatacagcaaggtctgactgcataacttgattggggcaaggccaccccctgttgtcttcattctgaggctctgactcagctggttgggaggtccgtggagaccccaaaactaaacagtgccagagctctcctggccttcctcaacagcatgggccgctgccctttcaggtatgcaaataactgggaattggctgccactaccatgcattatatatattcattagcacagcataggtgttgagcctatgaaaaggatatcttttctcaacagcaatttgcaaagattcccagtgtgatttttaaaacatggccttggccgggcgtggtggctcacacctgtaatcccagcactttgggaggccaaggcgggcagatcatgaggtcagaagattgagaccatcctggccaacacggtgaaaccccgtctctgctaaaaatacaaaaaattagccgggcatggtggcacgtgcctgtattcccagcttctcaggaggctgaggcaggagaatagcttgaacctgggaggcggaggttgcagtgagccgagatcgtgccactgcactccagcctgggtgacagagtgagactctgtctcaaaaaaaaaaaaaaatagcctttctggaataagacttaccttattagtattgtactctacagactcataaatgtcaagtaagatttattgaactcaaggcattttttttttaaaatctgtcttttattctgaactcagaaagaacaccttggaagtattgtaaacttcctaaggagttgttaggaagctttttagaattttttggagttttccaaggtgacttttggagaaacaggttcacttgggagcttggtagatgatatactaaacttgatttcaagattcttttatgcaaatccaagtcacatagctagccaccaaaagaattgataatctgatgtaatgagtctctttttgttttcgttagctaaaaatgtattttactaattaaatgtagcctttttgtaaactcctcgttttttaatctttatttccttatcagctagacccaagtgcatcatttttctgcctattcactgtttttattttttagtgggaagatatgtttttactctttttaatcagtagggtttggattttggagatggctgtcatattcaggtcagaggcagttgacttggtgctgatgcttgtttcagcttgtttctttccattttcctccagagtaaagaaaagattgaaaaactaaaactccaagctgaatccttctgccagcgtttggggaaataccggatgccctttgcctgggcacccataagcttatcaagcttcttcaatgtctccacccttgagagggaggtaactgatgtggactctgtggttggtaagattttcacctgcagtgggaaagggagggctccccagtgtgcgctgcccaggtccacagcttactagcggggactgggggcacagtgaggtgtgggaagtggggaggcagaaggagataaatagaatgaaacactgttatgactggattacgtagatttggacggtgatctccaaaagaaattatcacgaacattggtgaagattaagtatactcttatagtaagattttctagatggtatgacactttaaaaagctgatttttgctagccacccgctctcaaaagtaaaactttaacaagaaaatgtagtaaccatctgtagtgtgttaagcagagacaccatggtcgactcctaaacctaaaaaaaaaagcctctgttacaaaggcttcaaaaagcaaaactcaacaggaacagggcgtggtggctcacgcttgtaatcccaccactttgggaggccgaggtaggcggatcgcttgaagccaggagttcgagaccagcctggccaacatggtaaaaccctgtctctactaaaaatacaaaaaatttgctgggtgtggtggtacacgtctgtaatctcagctactcgggaggcagaggcaggagaatcgcttgaaccagggaggcgaggttacagtgagccgagatcaggcctctgcactccagcctgggcaacagagcatgactttgtctcaaaaaaaaagaaaaaagagaaaaactcaagtttcccagcaaaatttccagttcgttaaagtttactttgccaagtgcaatgaaaaaatgggcatccaaagaatatttactgttttagtttatttagcatatttctttttcgtcatctcacccgtgatctgaatcattcattcctacactgcttggtgtagaaattttcaaaagggttgcaaattttcaagtagacctgcccatatcacctgtggtggggtttctctttccctaaatgcttttgtatccaccaaatatagaagtccatgttcacatcttttcatgcattccttaagctaaggcttaagccacttctgaaatactaccttgagcagggaagtggaggaaagggcattttgtgattgctgctgctattttggagttactggtacataatcaccagtcagaactcctgggttatttctggttcgtcaataacaaacctcactttaccacatcctgatcttcctgccacagctttctttaatgccgtctatgtagacccaagtaacttattgataagagttatgtatagagcttagagggcacacaagctaggtaattcaggatagggcatgctgaggcctcaatcatctctaggtcaaggataacctgacaacagagactgattcttaaggagcaaccagaagatgcaaagatgtcatgtattatactgaggcagaatggcaagtttaggtgggtagaggtagcaagaaattctaattcaacatcatggtaagaattaaggataagaagatactcaaagacgggttggaactgctctagttctaagcaatttgattatttacaagagaacccatgagtttttgcaatataaaagcaacaagatctccacccaaatcccaaaaggggataagaaacaactgggcaaactatcagggtcccagcccaagtctgagtgtgatttggggttctaattcccattgggcagatcacccaaggcagaaactcagtcttgctgcctggtccacataatgagagcagaggaatgctgggattcagagtgtacacaggctgaccccagcatgtttgggtcacaatcacaaatgccttcaggggcatttgagtacatgcctctcccagtggaatgcaaatatagaaataaaagaaaagcaaacactgtgctgactaaataaagcttatcaggagaccctgttctggctatagctctggactcttgccgggtggcatttgggctaccctaatttccatgtgggaggggcccatggctgctcctggcctctctcctctggtcggaggaggattaaggacaccaacaggaggactaagaaaggtaggggccaatggaaggacattttcattcaaaacaaggatggccatattcagtgttcctgatcagtgactttaatcatacatattgtgaagttaataactgctgtgtgtttgaacagaaaggcatactttggagtgacaattgtttttcttaaagggagaagctcagtgggtgaacggaggacattggcccaatctagaaggctttctgaaagagccctctccttggaggaaaatggggttggatccaacttcaaaacctccactctgagcgttagcagctttttcaagcaggtatctcttcacattacagtgtgtctggatttttccccatactggcatgggcactggaacccacaggaggaggatacgtagtgattaagagagcaaattagttaagctcactctcttagttcattttctgctgcttataatagagtatctgaaactgggtaatttaaaaagaaaagggatttgtttctttcagttttgaaggctgaaaaatccaaagttgagggcccacccttggtgagggctttcttgctggcggggcctctctgtagagtcctgaggtggagcacggtgagcagctgagcatgctagctcaggtctctcttcctgttcttataaagccaccagttcccctcccatgatgcagattaatccattaatctgtgaatggattaatccagtcatgagggcagagtcctcatgattcaatcacgtcttaaaggctccacttcccaacactgccaccatggggaccaagcttcaccatgagttttgaaggggacattcaaaccacagcattcacaaagcctcaatttcattagccagaaaacgggaacaatagtacttaacttcatgtggctagcaggaaggtcaggtgacatgagacctgtcaagctcttcttagagtgcctggaatacagtaagtgctcaatgaatgttagctattttaactgagagaagggttaggttttgttccttgtgataccaactatcctatttgaactatcttggccaatccattcattatgctatgacaacagtctggctgggccatctccttcccggtggatctcagggtttcttggcctggctattcatgtgcaagtttccactttcactactgcttgatgtgcaagtttccagggctccctgcttgctcagagagggtgaccattccagatggtactctttgttagctcagtaaacatcaagactatttaaaaaaataaaaaacttcctagacttgtcaacggtatagagacagaaagtagaatgacggttgccagggtctagggatagaggggtggggagtcactggttaaagggtacagagtttcagattttttttgcaagacaaaagcattctggaggttggttgcacaacaaagagaatgtgcttaacactactgaattgtgcacttagaaacaggtaagatgggccgggcgcagtggctcatgcctgtaatcccagcactgggaggccgaggcaggtggattatgtgaggtcaggagttcaagaccagcctggccaacatggtgaacccccgtctctactaaaaatacaaaagttagccgggtgtggtggtgcacacctgtaatcccagctacttgggaggctgaggctggagaattgtttgaacctgggaggtggaggttgcagtgagccgagattgccccactgcactccagcctgggtgacagagtgaggctccatctcagaaaagaaaaaaaaaaagaggtaatatggtaattttatgttagttatattttgccacacttaaaataaactcgcttggtctgactctgttttggaaagttttccatagctacgcagtcttcgtggagcatttaaaggggttacattaacaaactgaaatgcaaaagggatgctgagggcgcctgtgcaccgtgccacatcatagaaatagtaaaggtctgaaaaggtttctattcagcatacatgtacccttcccaatcttatgaccttggaggacaaggtacttaactaagtctggatggtctcactgggaataagacatatctacccacttaccttactgggttgttgtaaggattggagatcatgcatgtgtgctcctgacccatcttgggcatatgtgggggtggacagcatttatacttaaccttgttcgagacaaatgtgaagaaaatgagatggaaagatgctttctccaccttcgaacatttgaagaagaaagtaaacttattctgtattgttccggggggtaatactggcatcagagggtgagagttatcggggggaagcttttggcctggttttctaatggtcagacgggcttccttagaatgcagcagatgccccatccccagaaggactgataagaggccgaggcacagtgagtcacagtgattgagaaggatttaacaagaagtggagctcagtgatttcagagctgtctataatcctaatttctatgaaagacttgtgagaataaaacttaaaggtaaaaatcttcccagaaatcgtttgtccccaacccaagagtcaaaggtgcatctacattaactctgacttttctcttggcaggaaggagatcgccttagcgatgaagacttattcaagtttttagctgactacaaaagatcatcatccttacagagacgagtcaagtcaattccaggtgtgaatgacttatctttatcctctttagctgtgccaaaactgcttatcgttagacacagtctttgtctaatgccagaatttataaaatcatgtttgccaagtgaaatgtgagattttgtgttaggggttaagaatctgaattgttctatgtctttggcaaacctattaatgtttttttaattttcttaaaggattgatttagtaaacaaaccttgtgctttagatctggtttctcagataatgagataattgtttaaacagaggagcccctttaatcaaataaaatattatacttagtattaaaaaagtaaatgtgagatgctttggtagaaggcaaaggcatcttccttatcctcactcggcagccctggaggtacttctgtagcatcctcaggtccagggaagccagtttgtgtttgtttttgtttttttgagatggagtcttgctctgtcaccaggctggagtgcagtggcacaatctcagctcactgcaacctctgccttccaggttcaagtgattctcctgcctcaacctcccgagtagctgggactacaggtgcctgccaccacgcccagcttattttttgtatttttagtagagacagggtttcaccatgttggccaggattgtctcgatctcttgacctcgtgatccacctgcctcggcctcccagagtgctgagatgacaggcgtgagccaccacatccggctggaagccaattttaaaactcccaatttttactgctagcaatgcagggaagttacttaacaatgtaaaattatactgtggtaattcaggaaagaactttaaaaatcctctaatccattccttctcattttacaatttcttgctttatattttattttatagaggctaaatctcgaaagttatcatgacacacttttctcaagctgtaggaaattagctccaaaacttttttacagtactatagtttgttcttattttcatgaaagaaacacagtgcaacaatctttcttgattccctcataacatgacagtttctttactagaacattcctattttctctctttaggcttgctaagactggagatttctacagctccagagatcatcaattgctgtctgactcctgaaatgctgcccgtgaaaccctttcctgaaaaccggacacgcccgcacaaagagattttggaatttccaacacgagaagtatatgtccctcacactgtgtacaggtaagaaacacaggctcgggctgggcgtggtggcttacaccataatcccataactttgggaggccgaggcaggaggattgcttgagctcaggagtttgagaccagccttggcaacatggcaaaaccgtgtctctacaacatatacaaaatttagctgggcatggtggtgcatgcttgtaatcccagcaacttggcaggctgaggcaggagaatcgcttgaacccaggaggcagaggttgcagtgagccaagattgcactactgcactccagcctgggagacagaaccagactctgtctcaaaaaaaaaagaaaaaaagaaaagcaggttcttggaaaaccgttgagctcacattctgagttttatttgaataacgttttctcatccttcaacctgtcttcctacttcctaagtttcagggaaatgaaatgtgatatttatgtaaccgtaggtgattgccaaatctctttctaaacatagtttacctaattctctttaacaagaaagggttacttcagatgtaattgtagtttaggattatagtggacatatgttttccagagattaaaaaaaaaatctgctagccattacctttgttctcctctgtgcagagggacatattagaaaaagagcaatgtgaccaaaatgtgctagttgtcaaaaggacaggttttcagctaaagattagctctttccaacagaatttacagcaataacataataatagcacacattccaatagcatttacagcaataacagaaagttctgtatgtgtgccagcagtacaatagccactaatcacatgtagctgttcagcatttgaaatgtggccagtgcaatggaggaactgaaaaattgattttaattaattttaatttaaagtcaagtaactgtatgtgtctactatattggagagtatggagctagacactgaaggcctaacaggttgggctgccttggtttctgaatcgcttatggtggcacctgacctattccatggggtctggaaggagtgcttgtcaacacatatctgccaaaggcattaatgctcatgcacttctttattttgagactatttcctttaatgcagaaaaggatgccttctataaaaatcatctcttccccaccatccagaaatgacattgttgttttctgtgtttttatataaaagaaatacagtggtactgattcagttgaagtcttcttttatccccagtctccagtcacagacttttacctcacctcctagacttttatcatcatgaaattatgtatttcctattttttctccttttacacacacttacacacacatctgtgaacgctcaatggcattatcttcatattcatttaaaatgtacgcaaatgacttcacactctaggtcaggggtccccaacccccgggccatagaccattactggtccttggcctgttaggaaccaggctgcatggcaggaggtgagcatcgggtgagtgaagcttcatttacagccactccccattgctggcattaccacctgagctcctcctcctgtcagatcagcagtgacattagattctcatgggagcatgaatcctattgtgaactgcatatatgaggcatctaggttgtgcgctccttatgagaatctaatgcctgatattctgtcgctgtctgccatcactttcagatgggaccctctaattgcaggaaaacaagctcagggctcctactgattctatattattgtgagttatataattatttcattatatattgcaatgtaataataatagaaataaagtgcacgataaatggaatgtgcttgagtcatcccaaaaccatcccctgccccccgctgccaccccagtccatggaaaaattgtcttccatgaaaccagtccctggtgccaaaaaggttgaggattgctgctctaggtgttatattacactttgtttttgtcactcaaaagattgatttgtttttcttttttctttttttttttttttttgtttgagtattactatggagtcgtgagtcatttttctttctacttacccagatttccacaagttttaccaatgggaactttttaatggcttgcatttttggaaatatcagtattgattcatgtaaaggtttgtgggtttttttggggtttttttcgtttttttgtttttttttgagatggagtctcactctgtcacccaggctggagtgcagtgacatgatctcggttcactgcaacctccgcctcacaggttcaaacgattctcctgactcagctgcccgagtagctgggactacaggtgcctgccaccacacccagttaatttttgtatttttggtagagacagggtttcaccatcttggccaggctggtcttgaactcctgacctcgtgatccacctgcctcggcctcccaaagtgctgggattacaggtgtgagccaccatgcccatcctgttattccttttaactgctgtttagtattcctttgtgaagaggccatattttattcatttccttgttgatacgcatttaagtctttttcaagttttcagctcttacaaacactatgaagtaagattttttgtctttgcccctctgtacacgtttgtgaaagtttctttaatatatctaaaagtgaaattaccagatcacaagtaatacacatttcagtcttaagttttctaaaattttacatttgcagtcctaacagcagtgtgagagaattcccattttccagttcctcacccatactttccagtatgacgtatgtgggactaaaatgcaaagaacttcagagctcacctgatccaagcattcccacccccacatttccagatgcacaaaattaagacccggaaaggataagtgaatggttccttgaggtcaaaaattacagcgaggtggccagacacagtggctcacactgtaaccccgctgctttgggaggctggaggactgcttgagtctaggagtttaagatcagcccgggcaacatagtgagacccccatctctacaaaacattttaaaaattgcccaggtgtggtattgtgcatccctgtagttctagctacccagaaggctgaggcagaggattcttgagcccagaaattcgaggttagccttgtgccactgctctccaaatcaagcaacagagtgagaccctatctctaaaaaaaaaaaaataatttagaaaataaaattatactgagaaatacaaacagctattcacacaggaatggagagttcttctttacagtattcaggaggtatacacttatttccccatttaatccttcctggagcagctcttcattttcaatcctcattccttacatctaaacttagtccccacgtctccctcctagaggagataagcattctcaggatgcagtagtttcgattctctattccttagaggaagatgaaggcatgaaaatgtttgcttatggatgctttgtatctttttagaaactttatcctataatcgggaaacaatgcttgtggcattggaagagacttgcatccaatgaattctgtagttattcaacttcccctcagcatttaatcacccacaggtggcatttacaatgttctctactcgttcctgcaaacattatcccttaattacatcacagtgggacttagagtgcattagtgcactgaatgatccagaaatgtaggagggcaaaggaggacaagtctggacggattacaatggacccaacttgtcatcatgagaaacagacccacaaatacagagttaatcttcttgagctgtactggccactgtagaagtgccaaggacaccccgttagaaatgccaaggccaccctgttagaaaccaggtcttggggaatgacagaagagatttctctccagtttggttgtggccccttctcttggctcacagttcttctctgtggctctcaggccaccatattttatagtctatttaaggaaagagagagataatgaacttggtttggaatcttacttcatgaaaatttcacagaatttaggaagcatcttgtctaaatatcttgttctaaatttttagtgttcttctccagtccttgtgtgctttagggtggttttgattagattgggcttgacagttacccagtcccagatgagtgtcccctttcctgcacctccccccattcacgacatggaaatggaaagaatcgagtgaggtctgaaccccaggtaaaattggcaagctgactaagttcgccttgggtgacctcaccttttcatttctgtccattttcctctctttttgttccttgccatctccccatatctcaaaaaacctggaccttgtagcttttctatactggcccccaaaataaaagtctcttttcaagcaacgatctctaaactcatttgctatggtattgataacaggtatggattagtcttatcactcccaagagtattatcattttgggccaggtgtggtggctcacacctataatcctagcgctttcggaggccaaggcaggtgaatcacctgagtgaggtcaagagttcgagaccagcctggccaacacggtgaccccttgtctctactaaaaatacaaaaagtaactgggcgtggtggtgggtgcctgtaatcccagctactcaggaggctgaggcgggagaatcgcttgaacccaggaggcagaggttgcagtgagctgagatcctgccattgcactccagcctgggcaacagagcaaaaaaactctgtctcaaaaaaaaggtattatcttggcagggacagcagttcctatttcttaattgaagaaatccagatttcttctcattccaagagtctgtcaggtaactttcactgttgatgttgctatttccatgccaatcaataatcctgatcatacctgtatcccttaaggaaatcaaataactgaaaatgaagatctgtggggcagataaattcaggaatatttcttcgtttatagaggattcacctcatgaatttgaaatatggcttggcttataaaaagttgatctgcctggagcttgtagctaacacctctgtcgggccaaacaataaatgcttacactgagaaagccaggtttgggatttcaaattaatgtgcccttaacataaactgcagagcccccctgggtggagggaactattacctggttctaatagcagatgttttctggccttgagtgccagtggtaaccagagtcacacattttaggattttggtattgatgagggtttcagctgaatattacttgagttgaactccagttatctttacctgtcttaaaggagcagctgccatagtgcctcaggtaaagttggcttgggataggctggcattgccttccagtccccagcctcaccttcctcccacctcttcactgcctcttttctttgccctgccccttcaggtgtcctgcgtggggcaccattcgagttgcattctagtgtattaggttggtgcaaaagtaattgcggtaatgtgtgtgtgctgccccgtgtctctaccttattcaagtttctttaaggaacagctgtagatgagttctggtagaactgggtagtgctcccagaagtatccccgtgggtccgtgagggttgggcattcataaaataaatccttgctctaacgatagagaccaacttctagagccagaagtgctcatcccaggaatgaccaggggctcccaaaccagcggctcgggccctctgcagtgccatgtgcagcctctgtgggttagaggcatggagctagagcagggtcctctgaaccagagccaggcaggacactctgagaaatcacaagcagaaggacagcaattctgaaagcagagcagaacagctggaaaaactgagctgatgaaaaggattatccgaatccaagcttggcgttccttgctctgtgtccagattaagaaaatgctagtggtttgcctaggaacacatttgcaccaactcctggcttattttccatgtgacccaacagctggtactagagacaccagctgctttctggtgggggcagaatgaaaacagcatgggctgaggccaaggcccagcaaggtcttcaagggcatcctatcctgcggccgccagaggggtatgtgcggagatcacaggcaatgaggttgtaatgagctgttaagctccctgccgtccctttaatgggtgattacagtaaaaagagccacataaagtacgttttcatctctcacttcagcccccgagagcctctgaggtcttgtttatccaattatcagacttgctgtggaggacggtgcttgctgagaacaagcatatcagttggaacatgatttctctgatggataattagctgttttcaggactcctcctattcagctgaatgttctcagaccagaagtctgatctggcctaacggggatgtgctcccatatcgcagtggagtcttaaggagtactacccaccttctcttctgcgggggaaaaggaatggcgtagcatgcatgcaggacctgaccggaaggaatgtctgcgagttatgatttagtgactagaacttctaaggaaagaaatgaaccagaaataactgcaaacgaagtggttaggaagaggggcaggacatggggagtatccttgaaagggacttaatttcatccaaggaaataggttcccagtttaagcccagttagctctgtattcagagtggatcttctcagtgctaggtgaaggaagggtggttgtgcatcagagtaagtgtccagccccaccctgaagactcccattcaggtggtctgggatggggcactggtggtctgacactctcttttgttcaaaatcaaagcgtccccctccttctcatggaagggaagcttccaccaacccttaatgagttcctgtaccatatggagttgtcaaatgctccataccgggcacagcggctcacacctgcaatcccagcactttgggaggccgaggcgggaggatccattgagcccaggagttcaagaccagcctaggcaacatagcaagaccctgtctctacaacaacaacaaaaaaattagccaggggtgggggtccacacctgcagtcccagttacttgtgaggctgaggtgggaggatcgcttgagccaggaaggtcgaggctacagtgagccgtgatcatgccactgccctccagcctgggcaacagagtgagactctttcaaaaaacaaaaacaaaaaactctgtcctaagtatcagatgatgcggaagcccagtacttggttttactaggcttagcaagcagtcgcttatggaacagaagcttttataaacaaaccatgtagttaggaagggcagtggcagcccaggcaaaatctagtcatttgaattagccaaggaacggagacaaagacaaagtgaatttctggtgctagttgcaacttggtctcgataataaatcaggaacacaatccccacattcctaatgccttgctccaaaactcagcaatcctcctatttgtaagaatgaaaaaattcaggagggaaccaattgcctaaggttatgacagcaaagctaccgttccagtataatattcagccactagaggacacaattcactcactttctagattcagacacacgactacctttttcgttacaaaacatatgaagtcgtgatttatgaaagtaggacacatattgtattttttgcccttgaagtgcaagaccaggaaaaactgaaaagtattgcagcatcctccgagatcactgttgtcattttttcgcaaaggattttattctagcctgtcagtttctgcctcctttcattagtaagtcctgaccttagacatctggcatttttttggaaggtgtagtggggagggggaccaagagatgcatcccttaatgtagctaaagatcgaaatcttctcattttggggagagttgcttactatacatatttacacattcaccaattttgtctcatatgtaaaccacagaatgtgccgaattttcctagaatcatggttgaggcaggtaggagtaaggaggtgctgtgtacattagtgtcactgattccaccgttcacaactccataccactctccttattttatactcttgagtccacagtgctttggtgttacagcccatatagaacggtcctacctaaaagtcctgcggtcggtttaacagtgacgagtgtcatttttccactgtcctttacatagaattcagcaggaagcttcatgaggcaccctgtttctacatgagttgccctggttggtggaggcagaagcaatggagaagtggtgatgaaattaagtcaaagttaggcttgcatttgactctgatcttgaatagtttgtctagattagagggagcacctaaaatccaaaaagccttttgtctttgatttctatacttttgttagttttacaaattattatttaaaatcagtcctttgaagtggcttcttctcttctgacgggacagctttgggaaactgtttagtcttatttcttttgctattgggaagttgtgggggacgctattttgcagctttttcatcctcagttctgacctcctcatgtgctttacagatgcccccaaaggtcagcattcatccacctttcactgagagtgtttggccatctctaaagcagaggtattttaacagctctccttaatggatgtcctgtggtttcaggcctcagacaggctgcccttgggccctcagcagaagtcgggaatcgtcttatacttccagatcgtcttttactcaggcaaaatatgagatgctgtgtcagggtttcccaagggaagaaactgagtgggaggtgcaggtaaaccccacagtacaaaataaaacagagctgtgagtagttgaaaggactgtgttttgacagcgtaataaggtaattgtttaaaaccatggctaattcatcagatgtcatgtgtcttttatagttaaaagatgaaatttctttacccactggtgtcaacaacagaaagattctaaaactttcaaaaaatgtgccagtcctggctgctttgtttcatgttctttgacaactttcaaaatgtaaattgagattcatgcaactattaatggaaatataaatatcatggcttcataaggataaaattagaggagctcaacataacggctcattttaatgatttctaaggggtttccatgcccaggctaataactgtacatttagcaataagcaaatctcaaagcctatttcttatctttccctagaattacagcttttaagcccaagctggtcgttccttttataccactccactcacttgataggggtgacatgggctgagctttctctcctatcagggctcaaagacaagtttagcagcgtttctaaacttctgtcaatcagctcacaggacacagaccagtttcgttatcccattaacagatttacatttctgttctctggaagtgtcagttaatgtccttaaaggtaatatacacaaatgtacacaatagtctctgaatttttctcagaagacacactcagaaaccttagaattctgattcattctctttggctcagacttggatgaatttgcttctcagagtagggacatgaaaattattcttaatttatacttcatgtaatctgtttcttctttctccctccgccgccctccaatagctcttctgagcttgtttgttcttcccctaactcccattgttgaaaacatggcctcccctcattctcacctttccaggaatctccttgtgctcctcaagttcggctcatcgcaaacttggagttctgttttctcatgcccttctttcattttcttcttttaagagacaggatcttgctctgtctccaagattggagtgcagtggtacgattctagctcactgcagcctcaaactgctgggcttaagtgatcctcccaactcagcctcccaagaagctaggaccactgctgtgtgtcaccacaccagctaattattttatcttttctagagacaaggtctcactctgttgcccaggctggtcttgaactcctagcctcaagcaatcttcctacctcagcttcccaaagcactgggaggtgccactcttcttgtgttttttacctttgcatttatttcctggttacaatacttttaacttaatggctgctgaactagattctgccaatgtacgtgccgtccaggacacgttcatgccactttaattttcttagaacatcaatgagatagtcttactagggagagataaagggcaggggtttggttttctggcaggttttctttcattttaataacgagccaacccacggaggaaggaattgattgatggctgcttcctcttttgtaaagaacaaacatcaaattagtggtttgtcctcactttgcggataagcagaataataacacctgtgcctctccctgcattattttgaaactaatataattttgtttggacagaacgtagatagcaaccttaatggggaggaatgtggaagaggaattactgaagggggaccagtcagcctgtcaggcagcaactctggtgccaaagaatggacataggatcagagctgtggacccccgtcctgtttgtaaacttcctgagggtggcagagattcataccctttctcccatcaggacaaaaatcagtgtgttggagctcactcaggaaatgctctttgggattggcatgggaaggggatgaggccgattgacaattagcctagttcactgggattttgttgtaggagctgggtggtggcaccatatggccaacaggggatgccagcgacatccctaatttctctggcttcctgataggtcctggtagggtcggggttccaccgggatttgcctagtatggtctacctctgactgaaattaaactctaagtaggtaactggggaacgcctttctccagagagaaggttttgatgtgatctcatcatcggggactggattggacctggagaaatcagtttttctatagtcttgtttctagagtggcaccctggtcttgggcaggtcagaaggacagatagttggtcaccatcttcaacacaaatcatggctggaaaagggccccagtagggagtgcctttctcactcaccaatcaccaaggctagaagatagtctgcagattctttcagatgccacaaagctgtgattacagctgcccattggcaaatcaggtactagtttttgttaatcacattgcagtcttccttcactgtttcttcccctggtcccggaattaaggctgggctccatttgacaagttatcttctgtgcaggtagagcagcaggctgtgttagctcacagcatctactcagtaggcatggaaatatccactgaatgggactgagaaagtggaatgggaggggaacgtgtgaagaacaggaagtttgcctctttatgtccaaagtctgtctacttagagcaacaggatggtgatgatgctttctggttaaagatgtcatggcaacagtcttccctagacagctctctagcaatagccagtggcatgtaaaccctgcatttttgcactgtatccagtgtttgcaactcccttgtagaactttccctgaagtcagcaagaaccctgtgagaatcaggatttgtctagaaatttagcatttacctaatcaatgattctctagacatgtcagtacctccaagtgattcatatgcatgtttggtgggcgtcgagcatgtggcagtttggagaaggaagtggagaatgcagcagcagcaggagaaatgtttgatgttgctaaacatcaaccccacagcaagcctagaactcggggaatgggaggcatggtgcgggtagctgctgacacacagctctagagatagctgcctgcaaagctggatgggactccaggcaataggcttcagggcctaactgctctttcaaggtcactgattgttacaggagccatggtctgcagcattgagcatggaattattattactattaagcatgatcctcaccgtgatgctcttggggtggaacaaaagagcccagagagaatatgcttattttatgcaacctctaacgtttcctcccagagttgtgatgaaactgaaccaaactctagcatgagaatcggcatcccaggccagcagccaaaacaagtggtgacacttggccaggcacggtggctcatgcctgtaatccctgcactttgggaggccgaggcgggtggatcacaaggtcaggagtttgaaaccagcctggccaacatagtgaaaccccatctctactaaaaatacaaaaaattagctgggcgtggtggcgggcacctgtaatcccagctacttgggaggctggggcaggagaatcgcttgaacttggaggtggaggttgcagtgagccaagatcgcgccactgcactccagtccagtgacagtgtgagactctgtctcaaaaaaaaagtgccgatactttatatatcttctgaaagaaatgaagtctgtaagaaggactgttaaccctcagaatggtctggggatgctacatccccttgtggacttgtcacactggtatgagtgtagggagtgggaacacttcttctcagctccttcctcaccatgtgtcattcagggacaaagggagcaggatatcttccctttgaaaaatctcatatgcctggcaatactcgtcaccctgtgaataatgttgatgcattcacctaaccagtattataagcccctgctgtgtgtcagacactatgcttggtgctgaaatagacaaggaggggactgcctgtcttggaaggcaaatcccagtctcctaagagacactagaaccacaggcaaccatgctgatctatgcaatgacatgtaatgcaactttgtcctgcaaccaccttgagatctttgaaagttctcctacctccaaaactcagacaagtcctctctcttgccaagtgcctaaagcaaggatatgtttatagaggcagctgggggcatctggccaatttatttcccagcagacctgctgcttcccctgattccaatactttcttccccaacccaaaccaaggcgtctggcaatgttaaaaacatcaagaatgataaaacaagcattttaatgaagattattgatgtattcattggctgtttctttaaatgggtagagaactaataaaggatctaccccaaataaccaaaaatatcagcctcagcaccagcagaaattggaagcgttctggtatttatatgtgtttttctcagctggcagatttgttttaggaaactatttgcaaagcctgggaaaaatgtgctttctctgtctgttaaaggaacatgcaggttggttggtgctggttctccatctgacagttctgtctggtggcctcaaaaaaaaagaaaaatacagcatagtccagatttggactatgcaaatggtgtcttgaaacttaacttttaggtcttgagcaaagccaagtattattgaaatgtttattttgtttttatctgcaggaggttttcattcaaaatgtggtgctttgggggaaaaggaagggtgtttgtactaggtactttttagcattcttcttattatctgacctatcacagcctcttcaggagacattaattaatttagttcatataatcaacactggaaccaaggaaaaattatttatacttttagaaattctcatgttcttatacttctttggagattgaattgactccaaagagactattttgtgattaagaatatttttgtggccgggcacggtggctcacgcctgtaatcccagcactttgggaggccaaggcaggtggatcacctgaggccaggagttcaagactagtctggacaacttggcaaaaccctgtctttactaaaaatactaaacttagccagccgtggtgacgggcgcctgtagtcccagctactcgggaggctgaggcaggagaatcacttgaacccgagaggtggaggttgcagtgggccgagatcacagcattccactccagcctgggaagaatatttttgtgtggggagtcgttatattatgtccttagaccaggaggtccaattgaggcagaaatttttgaagtaaaaccattttttttgaaggaaacacatatttaaatatcaaagaacactggacgtatacttttaaaaatttacatacttgtgttagttatctattgctgtataacaaaacctttgcagctcaaaacaacagtcattatctcacaagtttatgtaggttacgcaggtgcagctgacctgcttggtctgagctttcgaaaagtgcagtgaggatgtcagcctaggctgccgtcacctcaagggtcccctgggggtggatccacttccaagctcactcatgtggctgttggcaggatgcagttgctcacgggttgttaggctgagggcgtcggttcctcactaagccagaggcttccttaagttccttaacatgttttctcatggggggcagctcacagtgtagcaattggcttcgtcaaaacaagcaagcgggagggtaagagacagaaagcaagacagaggccagggtctttcacagcctaatctcaagagcagtacctcatcacttttgtcctattttgacaaacgtcgtattgacttttgtcactacatcagaagcgagtcactaggtctagcccacactcaaagggagaggatttcacagagcaagaatatcaggaagcagaatcattggttatttcattagaagctgctggcacagttcttaatgaagctacaaaacattgaactgggaggaatatgggggtaggagggtgacagggagggcaggttaattttgtggatgctgaggacaacgtgcctcatgaaaagtgttcccatcagactggtgtatttctgtttcttttcttttttttttttttttttttttttttttttgagacagagtctcgctctgtcaccaggctggagtgcagtggcacaatctcagctcactgcaacctccgccttcctggtacaagcgattcccctgccttagcctcctgaatagctgggattacaggcatgtgccaccacgcccagcttattttttgtattttagtagagactgggtttcaccttgttggccaggatggtctcagtctcctgaccctgtgatctacccaccttggcctcccaaagtgctgggattacaggcatgagccaccgtgcccagcccagaatggtgtatttctaggacatctgcaatgcatcactctctaataaaagaaaaaaaaatagccactccttgacagatactcaaaggtgtggagtcccttactaaaccacactccaaagaaataagcctgcaaaatagggaaaagttgttttttacctagaaagcagattctctgcattttcttattttcaaatagtggggagaaaccctaagctgtacatatgaaggaatggattcatttctcctcttgcacagcaccccagcaccttgtacaccctattcctccctaactcccaaccgcacactcacctcccaagcatctgcagatctacatacatattatcaaatgtacagagtactgagtgaaatggtcactgtagctatggaaaggtgagatttgcaggctgtctgaaatgtttcttgctaaagtagttccaatccttcccccatttagaaaaaaatacattcttagtaaatgactttcaggcagaaaaagaaaaccacactggaaataggattctaataaaccaacatggggctctagctggtgaacatatttctgagccatccctatacagaaaccacaagacaaataagaaaaagtaaatccagatcacttagacccttcaaaccacatcctgggttccaaggacagtggctgcgagttaggaaagatacatttatccagtggaccttttgactgtcttgtcaatcttaagaaaaaaatgtagagtaaaaaattttggctgggcgtggtggctcacgcctgtaatcccagcactttgggagaccgaggcgggcggatcacgaggtcaggagattgagaccatcctggctaacacagtgaaaccccgtctctactaaaaatacaaaaaaaactagccaggcgtggtagcaggcgcctgtaatcccagctactccggaggctgaggcaggagaatagcgtgaacccaggaggcagagcttgcagcgaggcgagattgcaccactgcactccagcctgggctacagagcgagactctgtctcaaaaaaaaaaaaaaaagaaaaaatttggtttgggtcccttcccaccttcccttgcttcatcactttccttaagcctctaagcatccagatcttccccaaagcagtgcttcctagtcagtgattaccctatcctctttttattccttttcttcatgcacaccttcagtccataaatccaagctttttgtaaggagggagggtgagtaaaccaattcatactaaggtgagagtgaattatatataaacctcttaatatattaaatctaccaagcagtgtttcagaaggaaatctgctaacatgggcatcttacttgaaaaaaatttcagttggttcaacaaagtatggtttagaaatcattttcaatcaggatcggggagagaatttttttttttcttaaagcagttaggtttccccagcagatttcgaatgcttggatatttgtgattcttttctatgggaatctgatctggataagacctaagaccataaacactctagctttccctttgggtctttgctattgaaaactagttggacttaaacaagtgaagtgggttttaaggatggctcctttcacccatttctaaaagatagcattcttgagggtctgctttatttagcagaaggaatgctggttttccaatctctcactcaaaaggaacttttacttatctcatagaaaagaatgggatggagattaatgtaatagaaaaggtattctacaaatatcatagcagctatatttaatcaattcatgttcaaagatcaattagtagtaataagagttgtgctgtataaaatcaccatatctcatattcaaattgcagatcatcagttgaaaaagcatggattgttttctcactgaaagaaatctttaaaagtggtaccataagagacattaagactggctattgttttatttctctctctctctctttctctttctctctttctgtcatttgatttctgactttcagtggatttttttaacattacaaaatcatagagaaagaatattggaccatttattgtagagtttttaaacaatttgataccattttttttttctggcgtcttaactgcatttgctgtttgtgaggggtgtagaggtccctgatgttcagagtacagtaccagcgtttatgtgaaatattgcagcctggcctgtggaggacaggggttactaaggggcaagctgctgcttgcgataacacccccagtgcctccttctaatcttgcgccatttcccagggcagacagccttgtggggctctgactggtgccctggaacatgttttaccttccatttttcttgctctgatttctgaagacagaatgttctcttcaacctacacatcaggagttttccttctgttttcctttttcactggttcctttgtgaatttgcacttttatctaacctaaaacattggaaacaggaataaacacaaataatggcatgaggccgtggccacagaatgacaagacaggacacagcaaatgttttgggtttttttcacatttatgaaccttctcattctatttatttatttatttacttacttatttcttgagacagggtctcattctgtcacccaggctggagtgcagtggcatgatcatagctcactgcagccttgaactcctggactcaagtgatcttccagcctcagccttctgagtagctgggattacaggcatacaccaccatgcctggctaataaaaaaaaaattctgttgtacagatggggtctcactatgttccccaggctaggctagtctcgaactcctggcctcaaacagtcctcctgccttgacctcccaaagtgctgggattataggcctgagccactgtgctcaactgcttcccattctaaaaagtgtctaaggcagttatagaggttatataacaaggtataaaatttctgagtgaaaggaaaataaggagagagaaataaatctaagtgtgtgtaaggttaatatgtacacagaatgtttattaaggcctttgacagttcctttaaaaattacctgcaggccaggtgcggtggctcatgcctgtaatcccaacagtttgggaggccgaggtgggcggatcacttgaggtcaggagttcaagacaaacctggccaacatggtgaaaccctgtctctactaaaaatacaaaaattagccaggtgtggtggcatgtgcctgtagtcccagctacttgggaggctgaggcaggagaatcgcttgagcccagaaagtggaggttgcagtgaactgagatcacgccattgcactccagcctgggtgacagagggagactccatctcaaagagaaacaaacaacaacaacaacaaaacctgcaaatttgagctgcctagcagccaagcaataaagggaatcacaatgaacgataagattcatatatctgccaatttaaaaacaaaccagttctcttgggtcagtgcttctcaaacttgaatgtacatttgagacacctggtgcattgttaaaatgtaggttctcatctagcaggtccatggtgcatttctaactggctcccaggcaatgctatgctgatgctgatgctgacgctgacgttgatgctgctactcattggactgccctttgagtagtaaaattttagctcactcagaaaaacctcatagtttatttggagtaacatccctttagcccttgtagatattataagactacattacaataaagttctggtgagtctaattgttgaccagagagattgtttacttcagagcacctggatttgaattgcagtgtgccacctgctgctgtgttacctggtacaagttaatgcattctcttcacacctcagttttatcatcttctgaatgaggctaatagtagtacctgtcatagatgcttgtaacagtgcctgcatagagtaagaatgaaataatgttagctattttttattgttacatttaaaatagattttgctggtagtgaaatatgaatgataaaatcatctcctcagctgttttccttgcataagtaccttaaaataatgtatttgcaatttccttctgaatccttgaataaaagacaccagataatcagaagatgttactgacattagtaggcatttgaagttcactctgatgggatcagtctatttacaacaaattgctatagagagtaaaaagcgccaaccttttcctgtagtttttgaatgacagcatctttgttcatgcagttggctttgctgcatttccacttcatcaattttttggctctgtctttgcaaaaaaaaaaaaaaaaaaaaattacagagggagaattttaaaacacaaatgaagaaaaagaaattactttgaaattgccaaaattgtttggctgaaagagcttatttagaaaaacagagctttttatgtataaacctgtttcattggtgttgtatcagaattgcatgttgctagtagtttactatcaaaacaacacttgtgtttcaagctgttaaaaaatgaataaaataggccaagtatggtggctcacacctgtaatcccaacattttgggaggccgaggcgggcggatcacttgaggtcaggagttcgacaccagcctggccaacatggtgaaaccccatctctactaaaaatacaaaaattagccgggcctggtagcatgctcctgtagtcccagctactcaggaggccgaggcaggagaattgcttgatcttgggcagtggaggttgcagttagctgagatcatgccactgcactccagcctgggcaacagagcaagactccatctcaaaatttaaaaaaaaaaaaaaagaataaaatagaaacactgatttttctggtattttatacccttccccgaatatccatacccaaggcatttttaagatttccctaagctggaagcaccagaccacatgttatttaaaacatattaagatgtacctactgtattatgtatactttgtatatcattttataacagtctgcaaagtagcaggaaaaaatttttgccttcaggttaaactcagaagagttgccattggctaactgaaaaattttgcatttggtaagcatttaattaaaaatttattgatttcggttttgaggttttacttttcatatttttagagccaataacttctggaatctcagacatttttgtggaatcttaagttgttcatagatcctaggtgctgtgtttgtcatcctgagagcttaaatggccctgtccaaacctcagcctcagctcagagtaggaaattgtcaagcacttggtaactggtaagcaaatggattttagtcactaaatggagcgggaggaatggagtgctccctcaaaaagagcatttcagctggtcacagtggcttgggcttgtaatcctagcactttaggaggcccaggcatgaggaccacttgagcccaggagttcgagaccagcctgggtaacacaggaagatttcacctctacaaaaagtaaaactaaaaaattagccaggcattgtggtgccttgaatctgtagtcctagaaacttaggaggctgaagcagaggatcgcttgagcccagaaagttgaggctgcagtaagctgtgatcacgccacagcactccagcccaagcaacagagcatagactccatctccaaaaaaagaggctgtgacagaggaaggcagggggatgttaatcagagagacatagagactgggagagtctgaaagagaggcagagagacttacacaaattaaagacacagactgagagaaatggaaaaatgaagagaggatcccagacagattgattgacttcccaggtaacatataatatcttacaatcctgcagaatgtttaaagttgcattttaaaaggcactccgtttgttcacacaatcctggtaagaagatcatcttaattagtatcatactttgcagctttcaagcagttcttaggcatcattgcgtttaagacctggctccagccgttttattacagatgaggagattgacttgttcaccttacatttgtagagcattttgcaatttttttgaaggacatttccacccattatctaatcacaagtctccataaatcccatctcccctggtataaaagcagcttaaattacaggtgctactaagatgcaaaatgcagcccacaaaatcagcaaatattttttctttgtttcctccttttttaaaaaaggcgtagatttcatattactactttgtttcaggccgtatattgaagtaacaaaaataaaaccaaaattgacaccaattttatttcgaaataaaatctacttttttcactttcccacatcattttctagctgctaaccttcatgcatattcaatttttgcatatttacagccctgtcaaagataaaattttattttctgcattttcactcaacattatacactgagtattggccatttcactcatctcagtgccactttcaaagagatacccaggaaaagcagcagcaagggttgttcgaccttgaacaactacagataatactttggctctctttgagatttttaaggccctgtaagtaaaatattttcagattacagaaggcttgggattctgtctttatcacatgactgattggtcctccatgttctccttggcagatgtgggtatcagtgacacaatgttttttactcaaaacatggtttagcttaccagtaccaggaatggccgatgcatacgcattctcattgtgaaggtttatttgcacctccactcttcttaaccaggctattttcacagaagaaataaccccaacttcatgaaccctattcccatgacctatttgccaatctgttaaaataatggccaactcaaatgatcagtaatgattgactcaccatgacatcatccatcacctttgtcactggaagcccacttgccttaaagggtgcagcatcttccaactttgctccagcaacttcagctcctcattaaatccctccctgtaggtcatccctgcaaccagttgacactggagctcagcagccagctgataggggccttcactcctcttgtcgagctgctcctctctcctctcaaagccctctttccttctctcctgctggctgacctagaagctcagctaaagaggtgttcaaagggtccagtcgcttaaacaggtggccagtgtgctttctgctataactccttgctccttgagctcagctccaagctgtagaaggccatggaagagcacattgatgtcatcttgggaataattaacagggtccggtttttctgttcgtttccttgcaccagatgaagagtaggataaacttgggagaagccaaagtgatgtttttgtattgtggctttgaatgatttcaaggtcccttggttaacctattctcagcaaaagaaatagaagatggtcccaagatggtaagagcagagtgtttggttgataatttgatctaaaagtgaccagactccacaagttaacccccagagctgctcaattacagcagtttaaaaataagttgaggattcgttgctaaatcagtggaaagaatttggagtttccaaaatagtttgtaatcaagaaaagccatctgaggaggccctggagggaaaatcgctgatgattatcaaatgtccagttctcaatgcggtggtatatgtgactgaaaaaaaccacttttgtccacatttggggaaagataagattatactaaatgcctggcacatacactggaccttcagttacctagaaaactttcaaaataactttgccataacaagtggcaaattattaaggtcatgggctgtcttctcaaaattacttagataacatgattctctggccagtatgagacccttaatttatcacgtatgaagcatatgagcctgtttatccgttcgttaatcattatttttatctggcttgggctctgggttactggccatgcaggcagatcttcccttccaaaaggaaacgttattattctcttgtattcgtttctttaaaaacatgcagatttaacaaaacatattacttagcactcttactgatttagaaatatgatgacccttaggaaatgcatctccttaaaagaaattccaggcaaactcatttaacctttctggatgttagtttcctgaccttcaaaaaatgggatgttggaccaaattatcttgaagtttccttccagctgtgtgctcggtggggagtgctggcagtgtggggcaggacactgaatatctgtggtggtgatgtttggatacaggggtgagcaacccctttggaagcaacatgcaaaattgctgagcagtggtgggggtgcatgggaatgggtggcggtgcccctgtattggagtgtaagagacaagtgtggtgagagcagtctggcagggctactactgttatgatttacacagtccctttcatccagctacttcaaagcaccttcacaaactctggctcattattccttcaaacacagcattcaagaaagattgataggcgccttttaattaattcaaagatgatgaagctgagcattacagaatataaggggattcttccaaaagtatctgcactgcagaggggcatgatatataaagtgttcatcacaggtttctaactgaaacaaggaaatgacctgaacgcttatttttagaggagaccagtatatattatggcatattcagaatatgcaataccatgcacccattaaaatcatgtttattaagaatagtcacattagggaaatggtcataactgaacaacgtttagtggcataaaaaaagataaagctttgtacatacagtatgatgaaaatgtttaatgtggctgggcatagtgacttgtgcctgtaattccagcactgtgggaggccaaggcaggagtatcactgaaggccaggagttcaagaccagcctgggcaccatggtgagaccctgtctctacaaaaaatttaaaaattagccaggtggtcatgatgcatgcctactattctagctactagggaggctgaggctggaggatcactggagcccaggaggtcaaggctgcagtatgccatgatcataccactgtactccagcctgggcaacagagtgagatcctgtctcaaaaattgaaaaaaaaaaaaaaaaaaggtttaatgtgtagaagggaaaaggctaaatggaaatgtgttaaagtcttaacggtgatcttccttggagcaatgatatagtgggtggttgctattcttttctttatacttttatgtacttttatgttatgcaaggttgaaaaaatgggcacatattgctttcatagtcatttctgttaagataatcatatgattatgaaagagggagtgtgtgtgtgaaagtggaatggaccaatcaaatagaacagtaggaagacctcagaagatatgacacatgagctcaaccccaaagatgagaagaaccagccatttagtgaatggggaagccctctggggaacagaaggcacgaaggaaggaataagtttggaatgttctaggttttgaaaaaaggccagcatgggagaatgatgaaagataaggtcagagccattgccaagggcaaggtcatgtaggacccatgacgaaaagtttgggaaacccttgtaggggactgacataatttattttacatttttgaaaaatccttctgaccaatatatgaggaacattgtaagaggcaagtgtagaagtcaagatctattgagaaggcgttgcaggggtccaggtgagaatgaggatggttcagagtggagagacagggacaaggtaagttggagtgtgggtctgacttgttagccatgtggaggaaataattatcataataactatcatgtatgtttttagggggctctataacttcagtatgttttcagtgttcacatttgtaggtttacagagtttgtacttgataaggtacagaagtaagtcacttctcaaaaatcatgcctttagaagcatatatcatgcttctattatagtaatgataataatagaagtctactgctagtcataaaacttatctgttcagagaaggctttttttttttttcagagaagtcttccaggtttcagctgttgctcattaatgctcaccacagccctttgaggtcgatgcaattatgctttggaaaagctaagtaacttgccaaaggccatgcagctaaaagaagcaaaagctggattcaaatctcagctctctgcctccagagagaacaccctcaatcccgcttaacagacattagctctgcttatttgattggtggcagtggagatgaacagaagtgaacagtgagcagagaggggtctgtaccccacacacatccctgcaccccaactgtcaactgtcttccatcatcatttactatatccacgtccactcctgacagcatcagtggctcagtcttaccgacctgcatcagggttttgggctctgcctctgtttagacagagcacgatttgggaagtgctgctaagtcagccagtggctgagtagaaacagccctgcagtgggcctctgcctgctctgtggctcgtttatcatgtgtctcatctttaaaagttggggctcagtctaggtgcctcctggcctgagcaccccagaattctatgctgatcccttcattgtgacatggcctgtcatctactcttctgggaagaccatctgcacctcactgatacttgaagctcattgagtattgtcacatatcagcccagaaagtcacagggtacagcaactcatacttgctcccagcaccaggccagccccattctgcctccagggagtcacccaaaatagagagatgagggtaaaataagacctaggaatactatttatttgcctccatggcctttgaacttgcacatccaacgtaacggctcctgtgtgttcttgattgttccaattatcatttttcctctcgaatacctgagagcattcattattttgcaagagatttgagaatccctgtgccctaacttttctttccttgatgtgggatgttcttctgtgactaggtaagtttatctcaatgtgtccccaaataatttctcagaatgttaaattcataaaagctaccatgaaaggataaataaatgaaaggagttctgaggtcaaaacatttggggaaagaagagtctttctccttctgaggcattctcagtgcacagtaacctgtttatctcgctttgccttgctctttcccaagcacatttttgctcaacgccccctaccttccccatacacttgttaacactttgcagagcactagggctctgtgggacaggctgggaaatgcaggttgacatgccactgttaatacctagaaaattaaggcaaacttgtccctgagagatgtcaggatagcacagtatggaaaggccatgcttatcagggctcttatctgagagaatacagtggttatgagcatgactctggaactagacagtctgggttgaattccccgctctgccatttagttatatgatatggggtgtattacctaacatctctgtatctcatttgttcctcacttgtgacatggggatgatgacaatgataatagtaccaacctataggatagctatgagaattaaacaaattagtaaatatgaagtatttggaacattggcctgactcaggataagtcctgtttaaatgttagtatcattattattgtttcttcaagccaggaatatacttcatcaattatgtgtacactcattccttcattcaacaaacacttacttaatactcctgtgtcctaggcactgttctagtgctggagatacatcagtgaatcaaaaacatgagagaaaaatccctgtccttgtggaacttacactgtagtggaatctactactaataatgcaaatagaaagaaaaatatatgcaagttacccaggcactgggtagcctagtacctgtcctatagttgtcaaatggatggatatattattcttattgttgttgtcgtttacagtaattgagcttggaggtttgagctgccatcttagataagaacagaaagctaagccaatacgagtgccatgccagtaagaaaaggaaactattacataaagattaggaagaaaaaagagaagaatgacaagtaggccattatctatggccatgagttttatttaaaatgagctggaccttttttgccttctttatctgtgtatcagatagacaattacctctaggcagatttccacattccaagacatgaagactttctaagctgcagcagacacatctttacttgtagcaaaacagagagcgatgggggttattttcagatgactgtagctgaagaggaagaatcaagtaattcactccccccaataataattcacttctgagaggaaaaacttctttggaaaaagcaccccatgaatggaagtctcagcatttgctgaagaacttagttaaaataaactctagacctttttcattgattctttatctcttcttttccagaaaccttctctatgtctacccacagaggctgaactttgtaaacaaactagcatcagcccggaacattacaataaagatccagtttatgtgtggagaagatgctagcaatgcgatgccggtaaggagggaaacgaacatttgcctcaaatcagggtgggctgctcacccctgtcacttcacacaagtccgggactcatcagtgtacaaagtccgtctattccaggccaatactgctcagcatgtgcaagggcttctgtgcccaggatatcagtggggaaacagggtcagtcttacttgacgatctctttctcggcttattctgtagtgagcttggaacatacagatcattttagaggattaaaaaaagtcataaagtctttccatactgcccataggaccaccccactctaaaggcatacaaagtaaagagatggctcaacacgtgcgccatgtttgctgagtgtcttccatgcacaaactgtacacactgtgttatacacacacagtgttacacacttactcaagcctcggaccacagtgctgatgaatacaaagtaccgcctagtaattataaacacacaccacctccacaccttctaggagtggatctttgttctgaggcaaaatataaatcaaattattcatatatatatatatatataaaatgcagtgtgctccaaggaactcaaaatgccagaatttatactttttaaaccatctcctactaaatgagatggtggttagctattactatttcccataagtcatagaattcagttaatataactttctttctttttttcttttttttttttttttttgagacagagtttcactctttttgcccaggctggagtacaatggccgcaacctccacctcccaagttcaagtgattctcctgcctcagccttccaagtagctgggattacaggcgcgtgccaccacgcccagctaattttgtatttttagtagagatggggtttcaccatgttggccagggtggtctcaaactcctgacctcagctgatccacccgccttggcctcctaaagtgctgggactaaaggcgtgagccactgcacgcagttaatatacctttctaaaaagaaaaagaaaaaaatcctttctcttaatgtcccacccaaagaaaaaaagaaaaaaaaaaacctttctcctaacgtcccacctgtcttcccaatgcaaggtgtcttaagacagcggtggggtcctcttagtcctctctgctcaggcccctggcatgccactgccaggagtgccagatatgcttgtgcagatcctgtggcaaccaagatgcccagccaagagtgactgtgggctaaagtccagtctgttcttcattcactgagccatgggttctggtgttgggattactgcatctagaggaaagagctttttttctctgcacaaaggtgagtgcacttgttcataatgcatcctaaatgctgcttcaggcccaaggaggtatctttttctaaatggcacaaatgtggataaggcagtggagattcaaatcacctaagtgagtaggtctgtatgtttgagagagaagaacctggaactggggatttctcactcaagacaaaagtatgtaactttggcctgttggatagacctctaggcagtgaggcagagtggagagagtactggttttctaatctcacaaacatgtggcctttggtcactaatatagccccttggaacctcatttcacccttcatagccagttcctttgcactggtgtgcttgggccagttgtagtcccagcacttttttttttctttttgagacaggatctcactcttgcccaggctggggtgcaatggtgcaatctcgactcactgcaacctctgcttcctaggctcaagcgatcctcttgcctccgccccctgagtagcagggactatacgcatgtgccaccacgcctggctaatttttgtatttttttgtagagatgaggtttcgccatgttgcccaggctggtctccaactcctgggctcaagccattctcccacgccgacctcccagagtgctgagattacaggtgtgagccactgctcctggccaacccagcactcttaattgtacaaaatgcagctctatgagaccagaacatcctgttggcctgatgatagtcaatttgatgtacccaaatgttactgataatttgatcctttctctactggtgaacaggtcatctttggaaaatccagcgggcctgaatttctgcaggaagtgtacacagctgttacataccataataagtaagtctatttcagcattctaaatatatgccaagatggtttcatcatctcctggtttttccaagtcccgtgggtggttcctcctaactatttttataattcagggactgaggggcaaaggaaatccatgccagttccgtgactctgtgttgaagatgtataactttgccattaaccaagactgagagaagaacgtgtcttcaagaatccaatatagttttgacttttccagaagcttctattctagtatgatgcaaagaggttgtattacgttaattaaggaaacacatttcctaacttgctttgagaccctggaggggaccagaagcacagtccggctccccttgccctgtgtgtccctgtccgctccacttgacacctgccccactgtctgcctaggctgaccaaaggagaaatggaacactcattattccaccggcaaatggagtcatgggataatgcccaccctattattcatgttccacagggaagggagagacacctgcacagtgttggacggaattgggtttgatccgggcctgataacctgggcctaattaagtccttcatttaagcacattctgggattgggatgaggattaagtgaggtaatgtacattacatacctacattactttacaatgtacgtaatgtacttcgtaattaatgaagaacctagggcttcataatgcagttaaattggttcctttttcctcctgcctcattcatttgcttctactctttgatgagtgcagctaggtgctaggcttggttccttgggtagaaatggaaaaaggaggtcacagcaggagtccaaacctcatcctttcttcaaattaagttgttggagttttccattgtgtgggggagttgttttttgttttttgttttttgttttttgtttttcctgacaaagcctttagttcatgaacagttttatgtaagggaagtgcatctaataacataagcttggtctcagggacttccagcttcagagcagagtaatgtaaaatgaaaagcaaaacaccaggcaaattctgaggagcaaaggggctgtggcgttttacaatcagagaagtcatcattcttgctaaaagttatttgtgtataatgtgcttttgaaacaggtctcctgacttttatgaagaagtgaaaattaagctccccgctaagctcacagtaaatcaccacctcctgttcaccttctaccatatcagctgtcagcagaagcaaggagcctccgtggaaactctcctgggatattcagtgagttgtttccagcctgctgactcacactgcagttgttggtgcatctgaggtccctgcagagataaacaaccaaattctattcacttgattttttccagtcagaagtagcaaaacatgctaagccacattatagcaagaggcagaaatgatttgccttagcaaatgtcaaatttcaggaatggaaagctagcgggtgatagatgttggaagaatactcatctgttttttaaaaagcattgcagtgttcactatttccaaatttaatatccatgcttcacgtatagaactagctttgtcccccaagaagaaaccattttttctttaaaagatataaaaggtgaaataaacattgatgttgttcagacacacacaaacattggctacagagaaaaatgctactgctttagctccaaaagcaataaatcatcaatattaccatttcaggaggtctcggagatttaaaatgcaaagaactggacagaaattactgccaaaaagagtactggtcaatatctactcactgtttagttgcatttgattattgcgagctagataaattatcagaattatatgctgtaataaataccactttattatttacatcatctgtttcagtggctgccaattctcttaaatgaacgtcttcaaactggatcctactgtctcccagttgccttggaaaaattgccacccaactactccatgcattctgctgaggtaattggcaagctggccatcagctgtttcttgtccagctgtagtcttggaccaccttcccagactcactttccattcccatgtggccatggatgttcatcatgttctcagagagcacattgttctgataggatgggaggaataactgactgtgaaacctcattcttttaaatgccaccaaatcagaatgttcagtagacgcaacctacacccaaggcagcataaccttgcattatctaccacagagggattcccagaataatgtattatagaagaggaggcaaactaaggccattcatagtaaacaactgttcccatcaaggatccttataaaagattcccaggccagattcatccgtttctttcttgggtcagttgtcacagccctccggtagataccaaggtatttattctcctaccaatcccaatgccaatagcctttcccacttcctgtttctggcactttctcttgctcatccactctgctgcagtgcacccatttaaagagaagcccaggtggatcaactgaggtcaggatttcaagaccagcctggccaaggtggcaaaaccccatctctactaaaaatacaaaaattagctgggcctgctgttgggtgcctgtaatcccagcactttgggaggccgaggcaggcagatcacttgaggtgagaagttcaagaccagcctggccaacatggtgaaactccatctctactaaaaatacaaaaaaattagccgggcgtggtggcgggtgcctgtaatcccagctactcgggaggctgaggcaggagaatcgctttaacctgggaagtggaggttgcagtgagctgagatcacaccactgcactgcagcctgggtgacagagtgagactccatctcaaaataaataaataaaaaataaataaagggagcccaggggactgtccaccctgactgcaccagctgtcacactgctagcccacttctcagttccttgcataggtttacatcaataagtattattttgaagtaaatctcggacatcatatttcattttagtctgcatcttaaaagataagggatttgtttttaaccatcacaataccattgtcatactttaaaattttaactgtaatttcttagtatcatcaaatattcagtcactgatcaaatttttaattatcccactaatgctatatttttgacgcttgctttttaaaattggtattcagataaggtccacacactgatattgattgttacatctctggagacgcttttaatctacagatcctccatctcttttgctttccttgcaattttaagttgaagaatttctcagaaatttgaatttaatttcaaccgttccagtcaactttcttctctgttctttcgccatctaccgtctcacttccggctgttttcctcttattttcttttttccttaaagagagaaccaacttttgccctggaccacaggcatgtgtctggtaaaccaaaacttctctcatcaaagccatctaaggggcaatccgagtatgtccacagacatttccctgattggtctttatgatttggacatcaacacctttcagtatccctcaaaaccaccttcttatcatcaagttgcacactctaatttcttagaaccccctattatctttttaagctataggaaagacctgagtgttggagagagacaaatctgtgtccaaagtctagattctgccactccctagctgtgtgaatgttggtgagttgcttaccctctctgagtctcgaagatgaaactgagcccatatctgcatatctgcctataaggttgctgtaagcattaaatgagataatgcttgccaaacaacaaactcaattcctaagtaaacattaattcctttttcttacttgcgctatgctgtgtttatagatatacccttagcctctcttagtatcctttaaacctgcactgtctgataagatagccactagctgtatgtggctattgaggaaaatatggctagttcaaactgagatatgtgctataagtaaaatatgcaacagatttcaaaaacttcatggggaaaaatgtgaaatattgtattaataattttttacattgattacatattgaaacagtctttaggctgtattgagttaaatgaaatattactttcacatggtccttttgtgtttttttttttttttttttttttttagagacagggtcttgctctgtcactcaggctggagtgcagtggcgtgatcacagctcactgtaatcttgaactcataggctcaagcagtcgtctcacctcggcctccttagtagctgggactataggcatgcaccaccacgcccagctaattttttttttttttttcattagaaacagtgtcttgctatgctgctcaggctggtctcaaactcctggcctcatgtgatcctcccactttggactcccaaagtcctgggattataggtgtgagccaccatgcccggcccctttttacttttttaatgtggccactagatgattttaaattacatatatagctcacgttatatttccactggacagtgctattttagatcacagatggcaaactcaagtgcccacaggatccagatgagtaacataaatgaatgccttgttctggtggcatctgttcactctggagattgtctcttccccatctgaaggtcacagctgttctcttcactctgcagattggtgacatgctgggatataaggccaattttttcatttcttccagtactcaaatgaagttagaaaagcagtcttttataggaaattttcaggctttcaaatattggtaattaattttttaaagttcctaatacttcaaacagaacgtgtgtgtaggctagagcccactttgggccccagcttttgactgcttcagatagctttaaaggtctccatcccctgtacacatctacctttcattatgatgaaagacatacaaacctaggcgaggccctcactcaacactgcaggacatctctaaaggaatgcaatttcaatgggaatttaaggcaagaaactgtctgtaagacctacgaaggtaatgatatataaacgtataaaagagtcactttgagtaattaaagcaggagccgacctggcctagaaacatgtgggaaacacttggaaaaactgtggtgaaagggaaagtaatatcgggtactcaaaagtattaaaatttcatgtcttgtaaagatattctatactttgtcctgacaattctgattaatggggaaattgctgggatcttaatttattttaattcctagaatccagaatcatcaatgctggtttggaacttagagacagattacaccgttcagccctcttctcacagcatgagaacagaacactaaggcccagaaagtttagttgagtcgtctaagtaaaaataactagtttgaagcggggcacagtggctcacacctgtaatcccaacattttgggaggctgaagtgggcagatcacttgagcccagaagtttgagaccagcttgggcaacatggtgaaaccacatttctacaaaaaatagaaaaattagttgggtgtggtggtgtgtgcctgtagtccccgctactccagagactgagacgggaggatcatttgagcccaggaggtcgaggctgcagtgaaccgtgattgcaccactgcacttcagcctggcgacagagtgggaccctgtctcaaaaggaatgaataaatacataaatattaactagtttggtgtagaattgaagttgaatccagggctcctgactccaagaacagttagattagttttcaagagagttctgtatttgtataaccctgacatttccagtcaagttggtctgcattgcttgttagtaatcagaaaagggaattggattgctaatcttttttttttctctttaacacagaaagtcccattacagaatcctcccattaagtgggctgaaggacataagggagtatttaatattgaagtgcaagctgtttcttctgtacacacccaggtaaggaatgtcaaggttaatcatgaaggtaaaggtgcagcggaggagcctttgaaggacaggccaataaaagatcagtgaaaatccttgtctacagataaataaaaaataaccctttagttctttgtggggacatgcaaacctctttaggtttcatttgtcattggaatagaaagaccttacaaaaccgccgagcacctaaaggaaagaacctagtatctgcactgttggtggagaaactttgcagggggacttgatttgaaactctcatctgctgttacttcttttccctctgtaactctgccactttgccagcttttaaaaagaaattccgtactctctcctttacctgccactgtctgagttctgcatctgctgagacctctctcttggcagtatgcttacctggtacgctgacctctgcttacagaacatgtcagagccaaaattatttcttctttagctaataattattgaaacgttcaacttcatgcaccacattctacaaagaagttcatagcctcggtctgaaacatcatgtcttagaccttctggtctgaaacgctggataagaggttctacccataaagagctattcgattgtgtttgtgaatccactggtgaacattgatggtataaaaccccatgaggcctgccttctcccttcgcaggacaaccacctggagaagttcttcaccctctgccactccctggagagccaggtgaccttccccatccgcgtgctggatcagaaaatcagcgagatggcgctggagcatgagctgaagctcagcatcatctgcctgaactcctcccgcctggagccgctcgtgctcttcctgcacctggtgctggacaagctcttccagctgtccgtgcagcccatggtcatcgctggccagacaggtatgaacctgcagggctgggctgggaggaggcaggagcaagcaagcattgccttctttaatgaaaaatgactttccagaaatccagagacaatgtgatcttcctttccactgatgatgtgtgctcaagggaggccaagtcttatgctattttttttttgagactctctgcatgttggaaagaaaaagaaacattaaaatagggttcttaatattatagctttttgtaaactttattaaatgattataggcagtctttaaaattccatttctggtaattgatgaatttattttaccttgaagatatttttgttttcttgactaacaggaaatggaacattttaaggtaagacaacctgtgttaaatggagggaaggaactctctacattgaaatgcaatgcaatcaatttttaaagttaaaacataaactcactattttaaagtgtatagttcattggtttttagtatagtcacaaggttgtgcaatgatcgctacaatctagttttataacattttcatcacctccaaataaaaccccatcactccctattcatccctccccctagaactcatccgttctctcttacagtctattttaaatgcttacttttaacaagttaacactaaatacaatgtgtacattttcccttagaaataatctcaaaagcttatcctggaggcatgaccagagtccagtggttctcctaactcttccagggtagactggctggtatagggcatctttatttgccaccattttcagctgtgcctatatagctctttgctttccagtccagcagacgtcttttgggtaccatccatatgcccagtactgtactaaaagttgtaggctttgtgacaataaccaagagcatctcagacctcagaggacttataatatggcaaagagtcagcagcacaggacaagactcctcaaagggacacagctaaattttgcagtggttgtggggagggtggtatcaaaggagagagtgagaaaacatccatctgggaggatgcaggaggtccacataaagagatggccttgaagaagggatagagtgaaaaccgacagaataggggcaatgagatgagtgcagcactgcagagaaccagaaaagtgtgggagtgtcaggaagaaagtcagtagcacagttggtggtggaacagaagcacgtgtggaagtgggctgggacaatgaagtgagacggcttttagagccagggaggggcatgtccccttaatctctcactctgctttgcaccctgatatgcatcttctgtggttccacagatcaaacgtcctgtgttggaggctaacttttcatccatgtagcagttgcctctccagctagattcttgcagagctctgccctccttcgattactttctgtgcccccgcatatgtggcacactgctttgtatgttccagctagttaatacagacttgttcaccagacaaaaatatttatatgttttgagcagcttctccatagcaagttgccaccttgtggtgtgaggaccacagggtgttggcataggcagaataagtggaggtggctagtctacaagcatttattcagaacctattctgtgtctctgcaatggaaagcacagtgggggcacaaaagatgtgagaaatgcacttcgcatgggaaggattccagctttcacagacagacagtttaccaccagacatggctggagaatcatgtaactcagtttcacttgagccctgtactgtgtggagtcagacggcttcatggaggaggtgggacttgtgctgagattcacagggtcggtatgattttgtggatgggagtgaggagggcttcctaggcgaggacaacagcatgagcaaagtctcagaggtaagagagcaggcatgatgggacaatacaatgactgcctcattttaagggatgtcgaactgagccaaaaagggtacaaggttagataagtatattggagccaaactatagaggcttagggcaccagaacaagaggttctatgcagtaaatcaaatgtgtatgggcccactgtgggaatgacttgatatgcagacatttttaggttaatctgtacaagaatcagggttgtgcagcacatctcaaatcatagtgtccacaacagtcacgtgagcatcttgtaaagatgcagaacctgattaatacactctctggggtggggcctgagattctgcatttcttagtagcaagcaggtgatagtggtcgtgtgtgtccgcagcccccactgagtagcatcagtttacaacctggcttagagaaggaggacgtctggacagtcttatgtctttgtcattaaaaaccatcaatgctattcagtggcaggaggaggaagttcaaaagagggaatgtggaggcatctgtggtactcagagccagcatgccagagctcaccaaaaccatctacccttcccaggcctagttaaattggtcagcggtcaggactcattgtcactgtcctggagaaacttccacctcaggctccttaaggaccagctgtgggactacccatttttctcttggttcctcagccaacttctcccagtttgccttcgagtccgtggtggccatcgccaacagtctgcacaacagcaaggacctgagcaaggaccagcatgggaggaactgcctgctggcttcctacgtgcactacgtcttccgcctgccagaggtgcaaagggatgtgcccaagtcaggtagagttgccctgagtgtgggactctggtgggcggggcaacaccacctccaccccactgcagtgtaatccaaaataaaacatcctatgctgggtgcaggggctcacatctgcaaccccagcactctaggaggctgagatggcaggatcgcttggagcagtggctcacatctgcaaccccagcactctaggaggctgagatggcaggatcgcttggagcagtggctcacatctgcaaccccagcactctaggaggctgagatggcaggatcgcttggagcagtggctcacatctgcaaccccagcactctaggaggctgagatggcaggatcgcttggagcagtggctcacatctgcaaccccagcactctaggaggctgagatggcaggatcgcttggagcagtggctcacatctgcaaccccagcactctaggaggctgagatggcaggatcgcttggagcagtggctcacatctgcaaccccagcactctaggaggctgagatggcaggatcgcttggagcagtggctcacatctgcaaccccagcactctaggaggctgagatggcaggatcacttggagcagtggctcacatctgcaaccccagcactctaggaggctgagatggcaggatcgcttggagcagtggctcacatctgcaaccccagcactctaggaggctgagatggcaggatcgcttggagcagtggctcacatctgcaaccccagcactctaggaggctgagatggcaggatcgcttggagcagtggctcacatctgcaaccccagcactctaggaggctgagatggcaggatcgcttggagcagtggctcacatctgcaaccccagcactctaggaggctgagatggcaggatcgcttggagcagtggctcacatctgcaaccccagcactctaggaggctgagatggcaggatcgcttggagccagaagttggagaccagcccagggaacataatgagactctgtctctacaaaaaatataaaaattagcagagcatggtggcacatacctttagtcccagctactcaggaagaagctgaggcaggaggatcatttaagcccaggagttggaggctgcagtgagctatgattgcaccactgcactccagcctgggaaacagagcgagatcccatctcttaaaacaaacaaacaaacaaacaaacaccctaaaattccattttcgttttcaggacaatacaaaacttacatgaatgctgaaattatgtgtttctttatagatctttcttcctccctccttgcctctttttatgctctaaacacttattttgtctgcccatttgataatccctcactggtctttacccacttgctaatttatgattcagctgagaatctcttttttaagatggagaagtggtgactgatgcctacgattctagtataataaaggaaataatatatatccaatggcagtggttcttaaactttttgttattaaaaaaaatcccttttcacatttccctcaaactgaactattgaaataatagtaatgcatttccccaactcttcttaattatttacataagtaataatcaagtagaacttcttgtcagcatgatataaaaattagtgtcagtgagttcacaaaattgcaggcccaaataaacatgacacttttgttggtctgtgcagcctcatttctagtaaatctgaaaatttgattgagtttttaaaaatactagtgatgtggctgggtgcggtggttcatgcctgtaatcaatcctagcactttgggaggccaaggtgagcagatcacttgagctcaggagttcaagaccagcctaggcaacgtgacaaaagcccatttctataaaaattacaaaaattagccagtcgtggtggcgggtgcctgtagtcccagctactcgggaagctgaggcaagaggattgcttgaacctgggaggcggaggttgcagtgagctgagatcatgccactgcactccagcctggaggacaaagtgagaccctgtcttaaaaaaaaaaaaaattaaatagtaatatctcatagatttccataaccgcttgtgaaaacatgtcaacatttaaagatgaaaaacagtgctgtatacatcatataccgtaatcctcacaaggttcagatgactctatggatttttgaatctgagaaaacctcactgcatgaattgtaaagttgtcatttaaatattgacaaattaaaaatatccacatttttagcttctcatgagaaatcagaagctctagcaaccctggggtccatttcccgatggcagtaatagactggagccagtagtaccccctgcctttgtaagaggcatgtgttggctgtttaccatgatctccaccactccctggtgccttatgccccatctacttctctccaaaagattgcctcctaccccaaccaggatttgttaagaagtctctaattccaaggcctaatccggtggcttttcatccaccctatccctcttcaattccttcttaaactcagtaagtaactctgttcccctgtctgttgacatgtctctgcctggtggggtgcaggcgctcccactgccctcctagaccctcggagctaccacacgtatggccgcacatcagctgctgctgtgagttcaaagctgctgcaggcccgggtgatgagcagcagtaacccagacctcgcggggacacactccgcagcagacgaggaagtgaagaacatcatgtcttcaaaggtaggaaagatgtcaaaccgtggaaggggacacaggcttttttattttttaactaaaacttggagaagtaacacagaagcaaccactactgctgcccaccatgctggtcggatgctttaatgctcagctttggagtgattaacgttctttagaacagattaagaccattctgacagatgcagcagcaagaccagcatctgaggatttgctgagaactacttagcttgggtagcaaagttttaaagcatcaggggtttagccacatggagtcatgtggctaaaccatgcattttattttcaaggaaaaaaaatagctttaacttttgatacctggaaaggttgcctttaatttagttttgtttctttaatacctacctcttacgttcattaacatccacagattgattatctcacaaaaaagtccaaaggaacagccgggcatggtggctcatgcctgtaatcctagcactttgggaggccgaggcgggcggattacttgaggccaagagttcaagaccagcctggccaacatggtgaaaccctgtctctactaaaaataaaaacattggccaagcacggtggctcacacctgtaatctcagcactttgggaggccgaggtgggtggatcacaaggtcaggagttcgagaccagcctggctgacatggtgaaaccccgtctctactaaaaatacaaaattagccaggcgtggtggcacatgcctgtaatcccagctattcaggaagctgaggcaggagaatcgcttcaacccaggaggcagaggttgcagtgagccaagattgtgccatttcactctagcctgggcaacaagagcaaaactctgtctcaaaaaaagatacaaaacattagttgggcatggtggcgggtccctgtaattctagctactcaggaggctgaggcaggagaatcacgtgaacacgggaggtggaggttgcagtgagccgagattgcaccactgcactccagcttgagctacaagagtgagactccgtctcaaaaaaaaaaaaaaaaaaaaaaaaatcccaaggagcaatgccaaattttacaagcatataaaaactgacatcctgagagggttgatggcttgccctatgttgtttttccctctatgaattctttatttttttcatggtaaagctttactttcagaacagttttagagttacggaattatatactctatacccagtctctcctttattaacattttacattcaaatggtacttttggcacaattagtgaaccaatattcatggaatattattcattaagttcatctttattcacaccttctcagtttttctctaatgtcctttttctgtcccaggatcccattctgaatgccatattacattttgcagtcttgcctccataggctcctcttgctggaaacaatttcttagactttctttgttcttcatgaccttgacagttttgaggagtaatggtcaagtattttgtagattgtctctcattaggaattttttaaagattatgatattattcacataccataaaattcacccttttttaaaagatggagtatacgatccaacagtctttaatctactcacaaagctaccacgatgaattcttagcctgaattttttctccaatgatctgtggcctcagggtggccgagctattagagtaatatcatttcccctgataaagagaaatcaaaatctctaggtttagacacagacacagtttcacccttacaaattccagccacttgacactgtgtggtgtgaggaaggaaatctgcaggccagggtttggggctgggcgccaatactgccccgctgtgtggccatgggaaagtcatgtaactgtgctgggcctcatgtcctcatctctgcagaggtcctggtccctgaatgaacttaagaaccatctaccctgggtcttttaaaaacactggatttggccgggcaccgtggctcatgccagtaatcccagcactttcggaggctgaggcgggcagatcacgaggtcaggagatcgagaccatcctggctaacacggtgaaaccccgtctctactaaaaatacaaaaaattagccgggcgtggtggcgggcgcctgtaatcccagctactcaggaggctgaggcaggagaatggcgtgaacccgggaggcggagcttgcagtaagccaagatcgtgccaccgcactccagcctgggcagcagagcgagactacgtctaaaaaaataaaaataaataaaaaataaatgaaaaaaccactggattcaccccctgagatgctgatgatctgtagtttgagccatcaggaattattcgtattctatcctttttgacttacaaaaatcagttcagggatgtgctggagtgagctcatacctgttcccaaaagctgattgcttagttttccagaattttttgagccagttttgaaacagacattgttaaaattaaatcgtataaacttaaaattaaataagttatattaaaaacaaaggtaatctgaatgcaatgtggtatgctagattgtatcctggaacagaaataggacatgagtgcaaaaactggtgaaatccgagtcgttcgtgtttagttaatagtaacatatcaatgttagtttcttagttttgacaaatgtaccttactataaaagatattaagagaaatgcaatgaaagtcatataagaaatactacctttgtaacttctctgtaaatctaataataactatacaacttatacttcaaaattaaaagttcactttaaaaaggtaaacctagtcccttcctaataatttcactatatgctacaatatctaagttcttccttctttacgtttactgtgtctgtgtgatggaaatattatataatggtttgctaccacactgcatttctatgacatcgtgttggtagattgaaatcagttatgatgaaagtatttgtggcacaaaaattggcaaatgctacaaattacccctacccccctgacaactggttgttaaacatttgccagcacaacacaactcagcctcatattgaaagcccctttcagtaataccactttctgatcacccaggaaagaagtggtctgcagctattactgacagccttgatctttctatttttctttaataaaatgaaaatattaaatttttatgtggacagggttagcaattttcgaattattttgttgcatggggagaaaatgtctgatagagcatgagcactccacttcccttcagaggtagtttttgacaatgtattggtgtttaggagacagcgtggtgcagtaccgtactaaaccacagagagacactgttcccacacattttttcctggcgtcccctgaagtcacagactcctagaagggactactcagcagcccagattcttaaatagtttttaactgtaggttgctacacacaaactattaacgggtgttgtctcaagagcaagtaaaattaggtataacttcactgtctttgctttgttttatatttacttatggcaattgttttacctttgtaaccaggaaaaaaaatatgtataaaaaaatgaattctgaggttgtgatttccagatgtctggcttacctttccatggttggttgactgttaagccatggtttgtgtattttagatcgccgatcgcaactgcagccgaatgtcttactattgctctggcagtagtgatgctccaagttcacctgcagccccaaggccagccagcaaaaaggtactgaagagagcaatgtgaggttcatcccaggataagaacagaaggatttcctcatgccctcacactgtgcttgggaatagtcaaagtgctcccctgcctgtccctgatgtgctaacacacacacaccccacacacacttttgcagccctgtcctttacgccacatttgaccacctaattgcccattaactcagtgtttctcccactttctcatgcatcagaattacctggaagccttgttaaaactcatcgctggaccctacctcctgagtttctgattcaatagatctgagctggaggctcaagaatttgcatttctaacaagttcccagctgatgctggtccagggaccacattttgagaaccactgcattggcctccttttagtagagggaaagctgggcacaagtcatccttgacaaaagtgaatggcaataattaggtatcatttgtttcaataccatataaactaatatgaaatgcttcctcataattcttcacaatcagccttacctatgagttcagaaactttaaaagctgttaaactgcttaccaggatttttaaagcaacaaaattccccaatcatagtcccagcctatgtggtctgagggatggagggaaaaaaaactgtctgccctaatttcctctcttctaggcactcaagaatctcaccattatagtagctacttaagtttttaatgtctttgaagacctgtattaaaatgtaaatatggcagggcacagtggttcatacctgtattcccagcactttcggaggccgaggtgggtggatcacctgaggtcaggagttcaagataagcctggccaacatggtgaaaccccctcctactaaagatacaaaaactagccgggcatgatggcaggcacctgtaatctcagctactcaggaggctgaggcaggagaatcacttgaacacgggaggcagaggctgcagtgagctgagatcgtgccactgcactccagcctgggcgacagaatgagactccatttcaaaaaaaaaaaaaaagaaaaaaagggtaaatatgcttattgcaaaggataacacaggaagccatttgcaagagctgacatcacagggaaatgtttattaaacaggcaaggagggaatgagcctccccaagtctccctttggactggatgagggaaagaccaagtgtgggagggccggggcctggtgctgtgcactttgcagtattccaggcaccatatgtctagtgagaggtaccaggatttaactataaaaggaaaagtgaaaaaagatatggttaggctaaaaacaaattagtccacttgctctaaaatttaatattaggctatcacaggccctatgcagtgactggttataggtattataccattttcctttcttaaaaaccattatttgcctacagcctgacttctttaacccatgtcctgtttggtttcgcagttgccatgttttgacttgaaatgaccagaatagagacattttatttcaaagggaagtttggccaatatgtttccttaataccttagcagacagagttttgctgcttggctattttatataacctccagagcaaggtgttcttgtaataatgctgcccagaaagcagcatgaattactttaagaagcagcttatccttgtctaatctcttcttgccataagaccctggcagacaaactgacctattttctagaggcgacctttgaagctgggggagcatgtctttcctacaatgagaagatcaaggtgtagtccagttataatatgtgcacagttagaccacctgctagactaaaactcaaccccacgcctctctcaagtgagacagcttcacttcagactcacaacagcaaacaaatgtgttaacgcatattaaaattattaaggtttgactaacctcacaaaacgaagtgaaaccagtcgataagctgaaacacctaagcattctccattcctcaccactaacccgcctgggatctaattggttaaaatacccaagcatgtatacagagattttccttttgtcatcttttagtttagctaagtagctctcaaattttaatgtacgcaagaattagtacattgggttgcatgcgtactggactctgtgggtaatttttttttttttttgaaacagagtctcacttactctgtcacccaggctggagtgccgtggtgcaatcttggctcactgcaacctctgcctcccaggtttaagtgattctcctgcctcagcctccagagtagctgggattacaaccgtgaaccaccacatctggctaatttttgtatttttagtatagatggggtttcaccatgttgaccaggctcgtctcaaactcctgacctcaagtaatctgcctcctcggcctcccaaagtgctaggattacaggcatgagtcaacacacctagccctctgtggataatttaaacgactgtcaagagcaatgtttgctgtaatcagtttttgctttaggtgttgactttaaaacttaatttgcaaataaggatatgatattagggtgttcaaatagctttagctttcttacctactttcttaccagaaaaaaaaaatgagtttatctacgtttattccaggttttgtgggcataagatgaaagaaaaccacagaaaattcccagacatcatttttggcattaattagggtgaccaactgttctcatttgcccaggactgagggagtccccaagatgtaaggttttctattttaggaccaggacattatcaggcacactgtaatggattgattgccctacctttagtcttgaacttcttcctcatcaaaatgattgtcaggaatatgaacacatagccagatatgctgtagaatggaaaaggtataagtcaccctgtgcactatttgctactgagcagtaggtgacttgaagggaagtgaagacgcaaagtggagctgggggactttccaagcatctggccctgggacatagacatttagatgttgtaagttaaggctgatactactatgcctttcagagcccaagatcctctcataaaccccaccgatcctgcttcccacaatgccatatgggcattataaaaacaaaaattgtccagtctcctagagagtttagacaccatctagacagtggtccctaaagtgtaaccctggaccagcagcagcagcagcagcagcagcagcacccaggaacttgttagaaatgcaaattcccaggctattgaatcagaatatctgggggtggggccccccagtctgtgtttcatcaggccctgcaggagattctgatacacagaggccgggcgtagtggctcacacccgtaatcccagcactttgggaggccaaggcgggtggattgcttgagctcaggagtttgagactaagtgggcagcatggcgaaaccccatctctaccaaaaaaaaagaaaaaagaaaaaactagctgggcttggtggtgcacgcctttagtcccagctacttgggactaaagtaggtgggaggattgcttgagccagggaagttgcagtgagcgagattacgccaccgcattccagcctgggcgacagagtgcagccctatctcaaaaaaaaaaaaagtttgagaactgctgccaccaaccaactgattttatggatgagaaaactgagggtgaagagaggaatggcttgcacatggtcacacagagagttttcagcaggacccaagaggaaagtaagacagtaccagttttaatggctacccagaatgtttcccccgtagaatagagtttcactcccaggctgagtccactccctcagatgtgtctgtcctgtgcagcactgaccccagccttctatgcaccgaaatgtcctccagtctcaggtgatctcagcactgactttgccatccaccacttactgcctagaacatctaagacacatgcttcaggaacgaacaagctattaaattggggggaataaaagaaaagaaaaaaagtgttggtgaataataatagcctttgtttcacagcctaatttttgtggttcttatttagcatttccatgaggagcttgcccttcagatggtggtcagcaccggaatggtgagagaaacagtcttcaagtatgcctggttcttctttgagcttctggtgagattcttgcgcgtttgtatctgtgctcaataggccaagagaagcacacagcagaaaggaattgacattttgttcactgagttgcccctgctgaaaacctggggtggtttcttgaaatctaataatctctcacccctcccatccttcttccactaaattgtgttgcttctaccatgaaaatctatcgccgtcctgtgagttctcatcaccttcaccactctccacctggccacacaccatcatctctcatgtgcctctcgcagtgacatcctctttttcctgcctgtatccatttttgctcttggcccacccattctgcacatggcagccaatactaaacagagaatgtcacgctccttttaaaaaccgatcgatgattttcactgcactgagaagaaagcacaaatttttatcatgacctaaaaagcccttgtatgattctgttgttttcctccctctctaacctcatctcacgccacattcccccatcattcagccacatggtcctcttttggtgctttgaagatgccaaggccattttggcctcacagccttttccagattctcttcctgctccctaactttcacctccgcacccccaacacacacagtttctattcttctctgtagatttcagcttcagtggaaccatccccaagaggccttttctgaccacctaatactgtaatatatcttcctctattatcctccttctgagcaccctatttatttctttcctagtggttatcacaatttctaattgttttttctgtctcagcggttagattttcaggatttgggtctctcttgtgtattatcccatctctagcctcagcacactgcttggtaccatgcaaggcccaattaatatctgttggaaaacagaatgaaatttgtatatctgtttatcctaaaacttctaccattactcgagcagaaaagcaaaaggtatagccataataccttaattttaaaataaggggaataatagtgataactatttttttgtttaattattaatggaagcaaaaggattttcccatagaggcactaaaaataaacattttctcaatgttgataaacagagatgcataatgagatgatgttgaatgaaagaggtctaaagacatagacaccaactatataaaaatatatatgcaaacagttcagaggatttggagtaggttgagatttagtgataatgttagctttatattcattgggttctttcccctgtcccattaagtgaatctttttttttttttttttttttttaaagagagtctaggctgggtgtggtggctcacacttgtaatcctagcactttgggaggctgaggcaggcaggtcacttgaagtcaagagttcgagaccagcctggccaacgtgacaaaacccatccctactaaaaatacaaaaattagccgggtgtggtggcgggtgcctgtaatcccatctactcaggaggctgaggcaggagaattgcttgaacctgggaggcagaggcagcagtgagctgagattgcgccattgcactgcagcctgggcaaaaagagcaaaactccatctaaaaaaaaaaaaaaaagagagagggactaaagagatgggaggggttccacctaagctctagtttttgtatgtaagttgaagcccaagaaaaagggagaaatgctgaacaataggacacagagaacaaagggcaaaggaaacaaatgaaccatccactggggaggaaataggaagcaatgtggaatagagttcagaagaagtcaggttcatgccacagaaacacacccaggattcaaatcccatgaagttttgcaaagtcccaacctctgttttgagaagggtcccaaagcatggtcccaaatccttgccacagaaccacctggaggtgcttagtaaaaataaagcagagattctttctcaaagcactaaaattaggaggctggaggccagcattgtgcatttacctgtcttctcaggtgacttctaagcctgttaatgatccactggtctacaccacctctgttctgtgaatcctatacagagctacaggtcttttggaatttgtactcagacaacaccagaatttttttttcattccaaaagccgagctaattaaggtggtggctgcagctcacaagtcttggggcaagagcattaacaatgagacatgagctccatgctctggcaggaaagggactgggccataagacccattcccctcttgtttcttgaggcatgagaagtatcaaaaccgtcaccccatgccctttatatcctgcttctatttacacatcccacccaccatcatgtctctccataaagaagattcactcagcctagctctgcaaaaatgaaaaaattacctgggtgtggtaacatgtgcttgtagtctcagttactcagcaggctgaggcaggagcgtcactggagcctaggagttcaaggctgcagtgagccttgatcatgccattgcactccagcctgggcaacagattgagaccctgtctcaaaaaaaaaaaaaaaaaaaaaaaaaaaaagaagaagaagaagaagattcacttgagtcataatccagctatggataattcatacaaataattcattcccaatgcggaattcagcattgcttattctgagtggttccatgtggcatcttagagctctctttccaaaggaagtttgcattctctgcaggtgtaatgatgtctctgttcttcacagaatcccaataatagttggcataccaatagttggcataccaatgggagaaagaataatcacatcaaaactactgagcatcttactatatatgtgccaggcagtgttttaagcattttaaagcatcatctaatgtaatcattatgcaatcttgaggcaggaggaacttttattatcccaaatttacagatggggttggaggaagggtggtggccataaagagagtctccaagtcagccaaatgcttcagcagtaccacttcactgcccctaactgcttttggccttgcacatttatttactagggcttcgttggcccaggagagaaagcataagctaaagcacatggcccatcttacctctaggaagtcccttatggtaaacagatgaagttttttgggaagaaagcccctgctgatctaagcatattgcaggggtttgtcaacatgcagatcacccaagacaccagttctaccagcagcctaaaacctaagtctgtcaggttctggcaggacagagtttccgttgcccaaaagggttaactgaaaagcattgatcaaaaggactctgctcagcatgtatgggaggttcaggggccaatgaggattggtgagagcccccagggtacagcagctggcagaagcctttctctatgctagctctaaagaatcaagagtatagcagagtaactggggcctagaaaaatctggaggcagatgagacaatcttagaaaaggagcctggggccttagaaaaatgttgccactaccaggacctcactgcagcagggatgagggcagtggaagtgagtaactacctgggcctctctgttctcccacgtaatgatccccttgtttgtgctcctgttggccaactccaactggaagccaaaggttaagggggcctgagtgatgtggtccctcgagacccccttcccagcattcagagacagacagagaaggacaagaaatccatcagggagctggggtaggggcaaatggaaactatcatcccccagccagaactttgcaaggaaattgatctcagactcagacaaggtgcccaattcttcatacattgtttatgcatttgcctgaccaatgcccaggaagttatttgaaaaccaaaacagttttgttttgtttttttccaagaagcttgagaaagacaacagcttccttggccttagccaacaacctgggcaatttaacaccctctagttgtgtcagtgcccaagcgctaatgaacaaccactttggcattagagctgttaaacacaatgcttgggcgactttcacacttgctaatgaataaaatccctgtgcttctagaaactgctgagccagaccttggagaaatagagataaatgggtgacctagtttactcactcaggacatgaagttccacattaaggggttctttagaggtacccttactttaaatgggccacaaaggcccatatagggggaaagatttctgtgcctcgccccactcaacagggccaggcctccactagtgtttctactggatgttcttctctggagatctggaggacacagtagctggcaagctgctgacagtctggaaagaggccattggttggaagtatggtattgtgagaattatgtatttggttgtaggatggccaaactcagcagacaggagccaaatacagcagtgagttctgaaagccttagtgctgggatggttagcctgcccagaatcaggattggcattgcccaaaacaaagaggccttatcttcttaagtcctttgttaggagcatagtgagagagaggcttttttcggacaaaaatgggtccagttcccacccttcattcgggtcttctcaccaggtgcatgcggccttgtgggatatgaagccatctctgtgtcccaaaccaaagaggatgccgccatgaggagaaaccatggtttctctactgagctttagggtttgatgtccttaggtcttccctgagctggccatggcgttgtctgaaaacatgaaacacataaagcctgtgtctctggttttttcttattttgccttccctttgttttttctgtttgtttccatgctaacaaaaattgccagtgctgcatgcatccttagaaactgaattctgctgttagtgtattaacgttctctcatgtagctcctgggagtggaagtcccctcttcttccagtctcaacacagagggcaaatgtgggtggttcaacttccagtgccattagtagtagtagtagtagtagtagtagtagtagtattgcagtggctgtctgactaatctagacgcatacatgaaaacgttttcagagtgtagggacccaaccacaagaccttctagtcttccccatgttcctaatagtgtaagcaacttccaacaaggataagactcaccctcagatggtgacaagggggcccatattgacctgtgaatctcctggccccaagaagatgtccaaaaaataagcatgatcttgatttaaaattgtggtaggcattgagatagtattattctagtcataatgcagacagtcaccaattgacacaaggatatctatatatagatacgatatgtatatgtatgtatatccatatagatatatctgtatataaatatctttctgtcagttgacgaattgtttgcattatatatgtaaccacagtatacaccagtttgtgtcaattggtgacttgtattgacacaaagatatctatatagagatactagatatagatagataatctgtatatagatatttttgtgtcatttggtgactgtctgcattatgtaactaaaaattagacttatggaactcaaaatttcccctagaggtaatgttttccctggaggcaatgttctaaatagtggttctgtttccagctggccaacatttcctgctcaatatataatatagctaaaatttataggagcagaagataactgctggaaactatagaactgtttctggaaaaactgtgctccctcgagaaacactgaaactcaagataggaggaacatttctcccacgttctccttactgtagtttcaggaacagaaaagactttagttcgcatcaagaaccttgtgataaactgttcctttctgagtcatgtgttctgtcctatgatagaggacacctagctggttacaggagcccagctcaggtctgccttccaggatgtaggcagttgagaacactgtagctaaagaattaagctcctggctttgtcagcagcaagaagggagcctctgacttggggtcaaaaagaggacacccttcccacctcccgccaccatggtaaccattggtgtgtctgcagcattttagtccagagcttgctcgggcaccaccagcacagataaagtgtcagaaaatccattgttagagagcatttctgtgagtctttcccccttttctgcattgtacaagcaggtcaccaatctccatgttgacatttcctccatccccctccgcaggtgaaaagcatggcccagcacgtacataacatggacaaacgggacagttttcggaggactcgtttttctgaccgtttcatggatgacataactactattgttaatgtggtcacctcggaaattgcagcccttttagtaaaaccacagaaggtaactgtattttactctttattttctaaattgtttacctggaacatatattactttcataatcagagaaaaataagcatcattttaaaacaataattaaaatataactgtaatgacagttaaacgcagtatgttatactggactggaccctgatgtggggctggaaaattgttataaacaaattacacacatgaggccaggggttcgagacctgcctggccaacatggtgacatggtgagaccctgtctctactaaaaatataaaaattagctgagcatggttgtgcatatctgtaatcccagcaactgggaggcagaagcaagagaactgcttgaacctgggagacagaggttgcagtgagccgagatggtgccacagcactccagcctgggtgacagagtgagactctgtctcaaaaaaaaaaaaaaaaagaaattgcaatatggactgtggtttaaatgatcatatcaggctgggtgcagtggctcacacctgtaatcccagcactttgggaggcaagggtggtcagatcacttgaggtcaggcattcgagaccagcctggccaacatgttgaaaccccgtctctactaaaaatatggaaaattagccgggtgtagtggcacgtacctgtaatcccagcttctcgggaggctgaggtggaagaatcgcttgagcccaggaggcggaggttgcagtgagccgagatggtaccacagcactccagcctgggtgacagagtgagactccatctaaaagaaaaatgtagatatgaaagataatatttttgctcttaggaaatacaccttgaagtgttatggggtaaatgggcatgatatttgcaacccattctcaaatggttcagaaaaaaatgtttttatgttcatagaatgataaaacaaatgtagcaaaatgtcaagtattgataagcttcgttaaagggtatacagtagttctttgtactattcttgcaccttttctgtaagtttaaaattgtttcagaataaaagctaaaacatatataaaatggaataaatcaaatgtttaaaaggcagctacaaaaatcttaggaagcaatgtttattattaatcgctttgtcgttattgagaatgtgcatagtaccaagtgctcaggagattttcattcggttattcctcatggcaaactttgttggaacagcatggtatctccacattggcaggtgtgagaataaggcacagtgaggttgataaattttccaaaagtcacacacagccagcagtaaagccaagactggagattttagacccagatactgagtcacgtaaggcacccaggaggagtggccatgtggagaatgcggagagagttcgaggacctctcagcggcacggtagcaacctctttatcaggtccccatccatcccagtgacttgactggtcagcatggcctgaatttgcaaattgcatgttaacaaaagcaaaatagtttcaaaccatatttttaatagtgtcaaaggaaattgatttgtcattctgagaataaaggacataaacatgaaaaactgaatcccagattgctctgaagcactgtaaaatccctcataaacaggagcactgagaaataatacaaattaaaaattttaaaaataggcgtagcttattaattgggattcatggaggaatttaccctacggagtgaatacaccctgcggagtatgactctgacctctcttaggctggaaatgctgcctaattgaggaataaatttcttaggtaaaaactaattcttttatcctgattggattttctgtaataatccttaaaaattaagaaactgtctcattgaaaacagtaagtatttttcaagtcagtttgccaaaaaaaaagaaaatagttacaaaaaaaaaagttaccaggatataaaaaaaagtaggatccaacatagtatatagagaatgaggttaattatacacatataaatatgcatgtagaaaaaaaagtgactggaaggaaatgcacctaaatattaacagtgcacgaataattacttgattcaacctcacagtcatggctttagttaaaggagactcaactacttcgcccagtgccacccagaaggacagtggctgaaataataggacctgtctctcccaatgttcccaccagtgacctggaagttcaaatccagagtgtcccacaaaatgatttgggtgtttgtttgtttttaaggaaaatgaacaggcggaaaagatgaacatcagcctggctttcttcttgtatgaccttctctccctcatggatcggggctttgtgtttaacctcatcagacattattgcagccaggtgagtgtcccccccacccccacccccgagcgagccacttggttccttctcatataatgtgatgttcgttgccatggcacgctgtcttcttcattactgagttggcatgaatcctacacatcctgtgttttgcagcacgtccctcatgtctgtgccatggacattcctcagacatgctggtttaccttgattcctggagcatttaccgacagtgtagaagggtcaacagattcatctgtgggaattaaaatttgtgatatgatctgaatcttcaatttgacattcaacagaaaattaacatggctatacagtgctttcagtctttgacaagtccttgcgctcccagtctgaggtctcttttcacatattagggtaattaattaaattgctgttgtgatgctccgacttgaaagaacctttttaaagtgttcttaaataaaatcattcaaagagatttaatttcactgagcacatagcaaatatttcataaaccaagtgcatctatcagtgccatccccccagatttttaaatggaattattcatgtgctgtctccctcaaactaccttaacaatagtaatataaatagcagttattgttgctgctcctctccttccatatccctaatctagccactagtaccatcattactgctactactaccaccagccaccaccattctcattagtcccatgcccactatcaccaccttctccaccatcaccacctcccaccacctccaccacctccaccatcaccaccacctccaccatcaccaccaccacctccaccatcaccacctccttcaccatcaccatcaccaccacctccaccatcaccaccaccacctccaccaccaccagcatcttcaccatcaccaccacctccaccatcaccaccaccaccacctccaccatcaccacctccttcaccatcaccatcaccaccacctccactatcaccaccacctccaccatcaccaccacctccaccatcaccaccacctccaccatcaccaccacttccttcaccaccaccaccatcttcaccgtcaccaccacctccaccaccaccacctcctccaccaccaccacctcctccaccatcaccacctccttcaccatcaccatcaccaccacctccaccatcaccaccaccacctccaccatcaccaccacctccaccaccaccagcatcttcaccatcaccaccacccacctccttcaccatcaccaccacctccaccatcaccaccaccacctccaccatcaccaccacctccaccaccaccagcatcttcaccatcaccaccaccacctccaccatcaccaccacctccaccatcaccaccaccacctccaccaccatcaccaccacctccaccatcaccaccacctccaccaccaccagcatcttcaccatcaccaccacctccaccaccaccaccacctccaccatcaccaccaccacctccaccaccaccagcatcttcaccatcaccaccacctccaccaccaccaccacctccaccatcaccaccacctccaccatcaccaccacctccaccatcaccatcaccaccacctccaccatcaccacctcctccaccatcaccaccacctccaccaccaccacctcccccactaccaacagctccttcaccatcaccacaacatccaccaccaccatcaccaccaccaccaccacctcctccaccatcaccacctcctccaccaccaccaccattagctccaccatgaccacctccttcacctccaccatcacttcttccaccatcatcattgtcaccatcatcaccaccaccacctccaccaccatcaccacctctcccatcaccaccacgttctctgtggttagtcacttagtgactttagataagtttttccaattttatgggtcttaatttcctcagttttaaaataagaagggggggttgagagatttgagggctgatcaacgaaaaggataggaccataaaaagcagtgacatacaagcttcattgagcagcacttggacagggttacataagagcggaagcccctcccagcatgagaacagccataggcctgcagtgaggaggggaccatccagaggagcaggggaactcccaggggagaggaggattagggcagaagcttatagatctgggtgaggctgctccacagcacagtagggagtctctgggtcagagagctccaagggctgtagcagcttagggccctgtatctgcaaggctctatcttatcattaggaaacagctgtccatcgagattttatggggtctgcaaaggaggcaggcactaaatggatgaaaatctgcttatatgagctatttttgttaatgactgggcatggtaaaatttgagttaggtatgagccaagggatcagcaccagtcgacagtgaagaaataaacaaccgaggggccaatacacagaaacaatctttgacttgtttacataacacctctcctccaaaaaaagaaaaagacatgacttttctaaaggaagtcctgtctacagccataccaccctgaacgcacgcagtctcatctaagggaagtcctgataaggaagcagaataataaaaaagaatcctaaggaaacatcagaagtccccaagcatccccatcccatgcaccctgacccctgccctgcagcggatcttctgtcccaggacccaccagaatagaatggcagagggacacttcactcctccttgccctccctcttcagtatttaggattccaggttagtctgttttcaaaactttaagttgagtgtatgaaagataccctagatcaccactgcagacccaggcttagctactcacatgcaggctatcttcattcccgacagggaaataaggcaacccaaggtagatatctgccttccctgcaaaactcatgtttttattttctctttctctttcctttcttttctcttgctcactatctttctccttaaattcttcccttttcttttagttaccatttctttttttgtttctctccttgactcaaatgccaaagatccctagaccaggagtcaagaagcctgcatgctgattcctgggacaccattaattacttctgtgattgggagcatcagcctttgaggcattcatttcctcatctgcaaaaaaactaggctggattagatttatccactgattctgtggtctgtgtctgccagtgacatccacggatgttacttagcaccattagtggcactcaggcctcagaaggtcactgacccccattcgtggtgatttaattcattgatcccagctctctagatacaggatgaacttcataccttaagcaagttgtattcttacaaagtcgtctgactttatcattttgcataacctattatgttttctgccatctaaagattttgtggcaatggatataaccttagtcttttttaatagtcactaaaaatagacaaatccatttcctcaattactgtctgtcacttacaatgtgccactaagcaaacacccatcccttgggtaggggcattgtgggtcttgacctttgggaaggaagtttttggaatgcaccttactcctcttttcaaaacatcactcaaattgtttttgaaatgtctattttttttcttttgagatggagtcttactctgttgcccaggccagagtgcagtggcacaattttggctcactgcaaactccgcctcacaggttcaagcgattctccttcctcaccctcccgagtagctgggattacaggtgtgtggcaccactccccgctaatttttgcatttttagtagagacagggtttcaccatgttggccagactggtcttgaactctggcctcaagtgatctgcctgcctctgcctcccgaagtgctgggattacaggtgtgagccaccacacccagcctgaaatgtctgtcttgaatgatgtctcaagggacctatgaaagatacccatagtggggccttcttttaagtgccaatgtgttgtgggttcaagttccgatagccggcttgacccgacacctgttaatgagtaacctaagtgacaggcacatgaccaagttctaatcccttcaatgtgctggtggctccactggtccaaagtcagccaggagtgcacatcgaaaggttatgggatctggtaactgtgcttacatagaagtcatatgttttggttttaaaataatatataatggcatttacttattttaagtggatgtctaactatgaattaattctgtaggcaatatgtcccacaacacattggcttcttgtaaaatggctgaaaatatgtgttcatttaaattatattgtttagtctgtaatcccagcactttgggaggccaaggcgggaggatcacctgaggccaggagttcgagaccagcttggccaatatggttaaaccccatctctactaaaaatacaaaaaattagctgggcatgttgatgtgcacctgtaatcccagctactcgggaggctgaggcaagagaatcgcttgaacctgggagatgaaggttgcagtgagccgagatcatgccactgcactccagttcaacagagcaagactctgtatctctctctctctctctctctctctctctctctctatatatatatatatatatatatacatatatatatatgtgtatatatatatgtgtatatatatatatgtatatatatatatatgtgtatatatatatatgtgtatatatatatatatatagtttaaaaaacaaactactcttgaagtgagtgaagaggaggcatgtctatcacaaggatgatgcttcatatttctgtgctggggtggggggtgataatgatgaaatattgaggagctcaaggtgcatcagcgccccttccttcccctattttgcctttagaggagctgcctctgagtctgggtctttcagttgttcagcttgcctgggggaagcaaggggtctcttccagacagtcacctttttctgcttttcattgcttgcttcatggtttattttttaaaggaagatttttcctaaaaactcttctagctttctttctctttcttctccatttcctcctctctcagtctgggacaagctccttgagttttttgcaggtactatgtactttgctaaacagtttgatgcctttctctagggaactggttctacaactttccaatggggcctttaattagaaactacgagagaacacttgtagtataaaagtcatctagtcatattctattagtttcatacaggctcatatgaggtcaactcctttcatttagtttctcgaacatagtagagtttttgtaaaattaattatgttacggtgaagatgtacctcaagattttcagcacaggcttcccatggtattaaagatttgataaagtggaaatcgggataagaatcctcattctggacagctactaggctagaatcactaaggggaacagtaatgaatgaaaatttattagacctctctgtaatgcagaatttaccatctgttgcactatcccattagtttttattaaattgattgccttaacctggagagaaaggatatttttgtgtctgccaacctcaactccacttaccttgtaataaatgtttcattcctcttttcatttttcttcccagctgtcagccaagctcagtaaccttccaacgctcatttccatgaggctagagttcctgagaatcctctgtagccatgagcattacctcaatctgaaccttttttttatgaatgctgatactgctccaacatctccttgtccttccatatcttcccaggtaataaaagaattatttaactaaaagaattattcaagctatttcatttaactagctcagtttaatcatgtatttcctataaaggttagtcttattaatttgacaaaaaatcaaacaattcaaaccagatcaagtatgctaccctgaagttacaccactagctaagaattaacaatctaagtaattggtttctccccaggctcaaggctccctgatcaggttaagtaaagccaagaatccaataagccctatgaaatttagaaactcatagaaaagtctcaaatcttcctttgtctgacattagccaattgttatattatgcaaatagaggattccaaagtaaataagttttggaaaccatgtattcaccaggtttctttgcagcaggccctctaagaggttttaacttgttcatgtcaattgcaaatgcacgagaagcagaagaggaaatgggaggaggtgtgcatgataagcagtgattccccaaatgatttaacatggaaaccccaccccacctcatacattttttgaaatgttactctggaataactttaagaacatgctgtttgatagtcacattccatttatagggaacacatcagtagctcagagcatcaggcaaaatttctcattattaggttatatttctgttgcatattccttgatactagtacaaaagtgaaggcttgtcttactaattgaaaaaaaaatcttagccatatatgccatatggcatgatccagatattagctacatgaccatcttactgtgaacagggaaagatctgactcacaagcagcaattcaaaatgtataaactttttgctccatcctgcccagcagcttaagtcctaaaacttccctggactaagcttaccctaggttctttcccaccttccccttctgactgccccagggagtggccaaacccaggggccaggctcacaaaaccatgaaggatttctaaagacactttagatgctcttaatgaaatataaagtgtgctcccaggatacaaatacaggacaggaattactgaggaccggtaaatctaatacttccctccctgacatcacttgtagttccaggccagcaaaagtctgacaatgtgcttaagccaaattcagaagtgtagctgaggccgggcacggtggctcacatttgtaatcccagcatcttcggaggccaaagggagtggaatacttgaggcaggagttaccagcctgaccaacatgatgaaaactcatatctactaaaaatacaaaaatgcatcaggtgtggtagtgtgactgtaatcccagctacttgggacgctgaggcatgagaattgcttgaacccgggagagggaggttgcagtgagctgagaccatgccactgcaatccagcctgggtaacagagtgacactctgtctttcaaaaaaaaaaaaaaaaaaaaaagaaggtacctgagtaagcagggccttaaacaaagggggcatttggttacagaggaattgcctgttcccagccccaggactgggtgaggttcttatttctctgtccaacttttatgctaggatttttatcttcagcttttgatttcaggtgggaaagggagcgtcattcatttttcaacagacccggggtgctttattttcatctttcccgctgggcagtcttctctctgtgggtatgggaaagtgcagtaaccactctgtgcctcagtttccttgtccgccttatctggcaccagagtacctacctcactggggagggctcacgaagcctggctggggcgaggactcagtaaacactggccatcgctattttcattccagttcttgtggctcataaaatggctccttacgtttctgtagaactcaagctcctgctccagcttccaggaccagaagatcgccagcatgttcgatctgacttccgagtaccgccagcagcacttcctcaccgggctcctcttcacagaactggctgctgccctggatgccgaaggggaagggtatgtttctggcatttaaaatggaagatgaagccaaaaaaacagatgttctttaataaaatttgcagtctagcttctcacacttggtaaaaaactctactgtagttgaccagttctgaggagtagaaacatctgtcttgagaatatggtacccataagcacaaggcacaagaaaggcctttcttgtgtagaaaggcaccagggatgggtaagaactacaaaatgacttttcttggtcaactatttcagtggaatttaccagttctgctatagcaggtttcccaaggatgctttgattagtgaactccctaggagcaaagccatttttaacaaaggggatagcatgcagaggcaaccacaagatgtcacttggttcaaagctgatgaaggaaataatggctgctgagaaggcagctgtcccatgcccagattaggtttcttgcagacagtgcttctcaggccaagagacaccacacatccagggcttctgaatccttttacctcttatctatctgattactcagggacatgtggcagtatctagcctagaagtcaacagacagagaggtagaccacccccttctttccttctctccctatgctccgtgagctcatggagtcagaaacccacagcctatctgattggactgaaaaagataatgccttctaaaatattattcattccgttcaacaattattgaatgccttccatgggacagacacagttaggtgttagagtacatcagagatatatcagtgcacaaaacagacaaaattcgctgcccctcaagagctcaccatccagggactcagattcaaagatgattaggattgcaaagtagttgagattcaacacttctggtgtttagattaggcatacagaattgcaggaacttgcccactattccataacagagaacgaaatctaaagccatggtcttcccagtcccttcccaggacccactctcctataccaaaccatctccctgcacagggaacctgttcccatgactcctatgctaaagaggtttccagaataatgtttgctaattaatggtagcattgctgtatgttatggatggatttttatctaaatggaatttctcaagttctctcaaagtgcttacaatttagtgaaggaaacaggaggttcctgcatgaaacaaatacaggagcacatcgagttcgtgcaactgcaacagtcacatgtgtcccaagctatgtacccaggctgacaccgctgaagtgactctatgtctgcgtctcctggcaggatagtgtggggaatctcatgcttttagctctcaattctgcctccttccagataaactggcctgagtatatcctttgagaacttcactttccatggcttcaattctatcttctcttctcaactctaactaaatttctcccaattatctcagtagaatgttctaccctacaactaacataaatttccacagcaacaaaaagtgcaccgaacacttatgctaataagtaagatactgagaagaaagtttgaacacaaagaaaattgccttcatgcacaaacatgtacatacattttcttagttgtcctttaatagcagtactttaagtgatttctagaaacatctttagtatttacaatagcgtagtttctattttctattttcattctagctggaaacagccatgacattctgttctggattccttgtaaaattgttgctgttatattactagcaacaaggtagagtatattcagagataatcatgtaattatgtttaatcaggtagatacattcttcaaacacacacacacacacacacacacacgcacacacgcgcgtgcacatgcacacacacagtaccctttctcccccaaaagagtaattaacagtgtaactcctttggcaacacagtaatccctgattgctgggttgtcagttactctcctggaaagtcattagatacactgtcacaacttcatcatgtaagctaaaacctcagaaaaatgtcatgcttcaacaatacttcctattgatcagcacttcctttttttttttcttttgcttccaagacagttggtagacttgccaacacctgtacatccatggggcaagggccagaaggacgcatctcagtacctgaacccctagggagctacagctccagtttccactgggtttcccttggatctctgacacctgggtatatccacaagtgtctatgcatcgttaaatccacagtgtttttcaagcatttagaaattgtctatcatctttgtgttaagccagcaaattgcaatgcctaattcaaaacacaacccattgccgggaccacagactaagaacaagaaaaacttttgaaatgcaatttacaattatcttactttagccacagtgcaagagtctgagtcatttaaaattttggttaatattttctatataacgttgaattctgatgtagccttattttgtttgaaagaaaaaaatgtatatatatgtatatattttttaaatctggattctttttttattattatcatactttaagttctagggtacatgtatacaacatgcaggtttgttacatatgtatatatgcgccatgttggtgtgctgcacccattaactcgtcatttacattaggtatatctcctaatgctgtccctccccactccccccaccccatgacagtccccggtgtgtgatgttcccacctatgagtgagaacatgcggtgtttggttttctgtccttgcgatagtttgctgagaatgacggttttcagcttcatccatgtccctacaaaggacatgaactcatccttttttatggctgcatagtattccatggtgtatatgtgccacattttcttaatccagtctaccattgatggacatttgggttggttccaagtctttgctattgtgaatagtgccgcaataaaaggattataaatcatgctgctataaagacatatgcacacatatgtttattgcggcaagatgtatatttttaaaattgaacatctatgactaggttccagatactccactatatattttatttactttttattatagtataatttatataaagaacctgaatcctaagtgtaaagtgcgattaatatttcctgtgaatatatttgagtaaccaccagtcagataaaaaatataatattccattatcctctctcagttacaggcccccctcaagtaaccactattctgactcttattattagaaattaatactgcctgttgttgaatttcatagtcttttgctgaatgttgtgactgtgacatcctttagtgtggtcgcatgtgtcagtattcattttttttcaactgtatgtcatattcctttgtctactataatttctcttctgtaaattgacatttgggctgctttctatttgtgggtattgggtattatgaaaacagctgccgtgaacatgcctgtgcatggttttgggtggacgttagaactcatttctttggggctataaatacagcctattttttattttaatatactgctcttgaatagtttaataaatatgtgtacatggtcttaacaaaatgtcaaaagaatatactctgagctaggaaaagaagagcaaacaagtcaaagcaggaagatggcagggaataacaaaggtgatagccaaaataaatgaaataaagaatagaaaaacaatcacggaaatccgcaagatgaaaagcttgttatttgaaaagagcaacaaaattcaccaatctttagctgagctgaccaagaaaaaaggaagaagactcaattactaaaatcataattgaaagattcaacacaatcatatcacaagagaccttacagaaataaaaaggattataaaagaatacgatgaacaattgaaagccatcaaattgataacctagattaaatggataaattccttaaaaggtacaaagtactaaaattgactccaagaagatatagaaaatccaaatagacctacagaagtaaaaagattgagttagtaatcaaacttcccacatacacctactatgtacccacacaaattaaaaatttaggctgggcgcagtggctcatacctgtaatcccagcactttgggtggccaaggcgagtggatcacctgaggtcaagagttcaagaccagcctggccaaggtgatgaaaccccgtctctactaaaaatacaaaaattagctgggtgtggtggcgggaacctgtaatcccatctactcgggaggctgaggcagaagaatcatttgagactggaaggcagaggttgcagtgagccaagatcatgccaatgcactccagcctgggcaacaagagcaaaactccatcacaaataataataataataataatatattttaaaatttaaaacttcctacaataaaagctcaaacctggggggctttactgatgaattctaccaaatatttttaaaagaattaattctaattttttaccaacttccagtcttctcttccaacgaatggaagaggtggaatacttccccacttgttctatgaagctagcattaccctatactaaaccagacaaagacatcatgagaaaactacaggccagtatctgatgaatatagatgtaagaccctcaacaaacactagcaaactgaatccaacagcatataaaaaggattatacaccatggctaagtaggatttatctcaggaatgcaagataggctgcatacctgaaaatcaattgttgtaccatattaataaaataaaggacaaaacccatacaatcatcttagtagatgcaaagaaaagcatttaataaaatctaataacgcttcctgataaaaacactcaacaaaccttttaggaaataagagaacttcctcaacttgacttaagggcctctatgaaaaatccacagctaatgtgacacttattagtgaaaaacagtgctttatccctaagattaggaacaagacaaaaatgtctacccttgccacttctattcaacatattaggagttctatctagggcaattaggcaaaaaaataaaacaaaagacatctaggccaggcgtggtggctcacgcctgtaatcccagcactttgggaggccaaagtggacagatcgctttgagcccaggagactgagaacaccctgagcaacatggcaaaacgccatctctacaagaaatacaaaaattagctgggcattggtggcttgtgtttgtagtcccagctacttgggaggttgaggctggagaattgcttgatcccagaaagcggaggttgtagtgagctgagatcacgctactgcactccagcctgggccacagagtaagaccctgtctcaaaaaaaaaaaaaaaaagaaaaagaagaaaagaaaagaaagcatttaaattggaaaagaagtaaaactatctctattcataggtggcataatcttgtttatagaaaaccataaggaatccacaaaaaactccattacaactaataaatgaattcagcagtgttgcatggtataagatcaacatacaagaatcaattgtgtttctatacacttacgatgagcaatctgaaaatgaaattaagaaaacaatttcatataaaatagcatcacaaagaaaaaatatttaggaataaatgtaacaaaagaaacacaagagttatacactaaaaatgacaaaacactgttgaaagaaagatataaataaatggaggatatcatatgttcatgaatcagaagacttattattaaaatagcaatactccccaaattgatccatagattaaatgcagttcttctcagaattctagcttgcttttttttttttttggcagaaattagcaaactgatcctaaaattcgtgtggaaattcaagggacccagtatagccaaaacaaccttgaaaaacaagaacaaaattggaggactcacacttcccaatttcaaaacttactacaaagcaaaagtagtcaagactatggggttctgacatatgatagacatatagatcaatgaaattgggttaagagtccaaaaataaatcttcatatttatagtcaattgatttttgacaagagtgccaaaacaattcaatgggggaaaatagaattttcaataaatggtgttgggacaactgggtatccacactcaaaagaatgaagttggaccctatattacactgtatacaaaaactaactcaaatagatcaaagacctaaatgtaagagctaaaactataaaattgttacataaaattatagaggtaatcatcatagacttagaaaaggcagtggtttcttagatatgacacactcgaaagtatgagtaacaagaaaaaaatagataactggacttcagtaaaattaaaacttttgtgatttataggacaccatcaaaaaaatgaaaaggcaacacacaaaatgggagaaaatatttgcaaatcaaaaacctaataggggacttgtatctggaatatatattttaaaatcttacaactcagtaataaaaagacaaataactcagttttttaaaaggcaaaagatcagaatagacatttctccaaagaagatacagccataagaccatgaagatgttcagcatcattagccgtcagggagatgcatattaaaatcacaattaaataccacttgatacccacgaagatggatataataaaaaagacaggtaataaagtgttggcaagaataaaatggagtcttcagacactgctggtgggaatgtaaaattgtgcagccaccgttgaaaacaacttgctgattcctctaaaagttaaacagaggctgggcgctcggcggctcacgcctataatctcagcactttgggaggctgaggtgggcagatcatttgaggccaggagttcgagaccagcctggccaagatggtgaaaccctgtctctactaaaaatacaaaaattagccaggtgtggtggcaggtgcctgtagtccccgctacttgggaggctgagtcagaagaattgcttgaacccaggaggtggaggttgcagtgagccgagatcgtgtcattgcactccagcctgaacaactccatgtcaaaaaaaaaaaaaagttaaacagacagttaccatacaagccagcaaatgtactctgaggtatgtacccaagaaaagtaaaacttaaaacttgtatacacatactcatagcagcgttggtaagtcacaatagctcaaaagcagaaacaatccaaatgtttatcagttgatgaatggataaaattcaccaatggaatattatttagcaataaaaaggaatgaagtactgatgctacaatatgataaacttaaaaacatcatgctaaacagcagacccagggttagaacacaggcagtctgtttctggattctatgtagttctatcctatattgcttggttttccagggttagaacacaggcagtctgtttctggattctatatagttctatcctgtattgcttggttttccagggttagaacacaggcagtctgtttctggattctatgtagttctatcctgtattgcttggttttccagggttagaacacaggcagtctgtttctggattctatgtagttctatcctatattgcttggttttcacagtcacctcattgcttaggagcgttttcatcactcttgactgtttaagagctctttagtcaatttcctttcaccataacctcttgattcctgtgttgtgccaacagaatcagcaaagtacaaaggaaagctgtcagtgcaattcacagcctgctaagttctcacgacctggacccacgctgtgtcaaaccagaggtgaaggtcaaaatcgccgccctttacctacctttagttggcatcattttggatgctttgccacagctctgtgactttacaggtaatggcccttctgttttctttcttggattgttgggggcccctgccaaatgccccatccgaatgagatctctgtcattcgttccagtgctgatatgttcatatgagcaattcttcacaaaaatggtctccaaacctctttaacactggccccaatcagttaaaaaaacaaaaaaagtcacatagccccatatgtgttttttgtttagaaattatttacttgtttcttcattcattcatttattcattcattgatctgctagtatggaatgaactttataaaccatacaccacaaaggatgaaataataacaagattactgcctttggagatcgtgctctaacaccttgaaataaaggtgttccttcccttttcttttatgaatatgtaagcaaaaaagcggtctcaaatgaacccaactaattgctccatgcaaaaaaaaaatcatggcatatgtcaatattagaaaattctatcatagcagagaaatattgcccttggcactaagtgactaattttgaggttaatatgtctagattagcaacaagatgaaaggataagttgtcttaaaggggttttgtgaaaccccagaatctatttacaaattacattgtggattaaggaatgtagagggaaaaaaatcctcccaaatagaagaacttcttatgttgacctgagaaaggcagtccattggcctaccctctccacagcgtacgtgtgtgtgcacgtgtgtgcgcgcgtgcacacacacacacacacaattcctatcccatcagagtagttcttgcttttcctccagctcaagggaagttttggaaatgtccatgctgctctcttggcagctgaagggtgctgggatctgggcaatgcttccctgagccagcctctttatagtcagtcatccttgaaatcttggaaccatccaggttttcccacctcctccaaatggaaagtgtcatgtgtgactaaattgtttataatactattacggtgacaagtatttagttcatgaaaatgggaccaaacgcctatagtctttaattcatacaaatcataaaatgaaaagcaagtattcctgtggaagtaattctctcctttcttgaaaaaaatcctctagcaaactgctaatggagtaactcagaagagaaaggttgagacaggggttagggtttgtagagttctgttggggccagagtgcaaggaaatgatagaaacaagctcagcacacagggctgagcaagctgcaccatgaggtcagcagcttcctctagcagcgcctgattgcgcggaattgaaaatggagttgtttttaacatttacagacataatgcagagcatggcatgtgacttgtagcccattttgagaatccttgatggcaagtttctaaaaagttccatttcaagagcttgcttgttcccaaagccaggaaccactttagcacacattatccgaagttttcttgtcaattagaatattccgtatcagtgactcggaatcagaacttttcaacatttggtctccaagccttttaaacctcaaagacttctttgtatatgcgttgaactttatgatcatgatgtagctgatgagagaaaaaaacagtgaaaagtattttattgttataggttacacagtacatctattaaatatggaatctttaggttgataaactcataagaatacagtctttcaaaaagatgcatctgaattcagattccagccccatttattaatataagtgacctttgaaaggctcaacctttccgtgccttcctttcctctgtaaactataaaaatgtgataacgatgtctaccttttaggtttacgataaaggtgaaactagagaacttctataaaagcattttgcacagcacatgtttgtatctttcccgatttttcttgtaactataaccctatggcaattaaggggaaataagaatgtgtctctatgttagttgtgataatgttatcaggtcttgcataatttccatgtgctgtttatttaaccatttgtttaaaatcccaatggccttaataagtatttctaaaaattgggttttggctcggtgtggtggctcacccctgtaatcccagcactttgggaggccaaggtggacagatcacttgaggccaggggttcaagaccagcctggccaacatggcgaaaccctgtctccactaaaaatacaaaagttagccaggcgtggtggcgcacctgtaatcccagctactcgggaggctgaggtaggaggatggaggggcagagattgcagtgagcggagatggcgccactgcactccagcctggatgatagtgtgagactttgtctaaaaataaataaataaataaataataagaactgggttttgttttcacaactttagtagaagaaatgttatttacactcaaatttttctaaataattgaaggcccagatggctgtaatgtcaacaggtctagaaaaacatgaatttttaggaaaacatgagtgaatcaatcagttgtgaatgttttaccacacttttcccagaactgcttgaaatattaatagtttttgattgtatactggtagcattcttaaaaaccagacttttaaacggtttatcgtttttttgcttgcatacatctagacctatctataaatatgggtatgtctatattacatagatacaataaattgacattcattttaaacatttgaaatatgacaaattattgctgaacttgtgataatagcttattattctatataaggtagttgcttaattctgtaattgtaggtgtcttctatttggtcattatttaaaataatgccaattattagaatagagaatgaagtttaaaaaattatgttacaggaaacaattatggaaggtttgaaaactttttgttcacacaatttgaaaaattaatttctagcctaatcttgtgctagacattgtctcttagcctgctgtgttttcctataggtgatagcagatacataatgctaaacatcaggtttgaaattactgtgctgactttagtgactgagaagtatcagtctcttattgggtaggggacatggggaaatgtcatgtttgacttgacatcacaaacgatgttttcattgcagttgcagatactcgcagataccgcaccagtggctcggatgaagaacaagaaggagccggtgccattaaccagaatgtggctctggccatagcagggaataatttcaatttgaaaacaagtggaatagtgctgtcttccttggtatgttggtgcacatgtgtctggttgatttttcatttcatgtcttctgtcttctgttttgttttgtttgtttgtttgttttgagacagagtctcactctgttgcacaggctggagtgcagtggcgcaatctcagttcactgcaacctccgcctcccgggttcttcatgcctcagcctcctgattagctgggattacaggcgtgcaccaccacacctggctaattttttttgtatcttttagtagagacggggtttcgccatgttggccaggctggtctcaaactcccaacctcagatggtacacccacctcagcctcccaaagtgctgggattacaggcgtgagccactgtgcccagcctcttctgtcatcttctgatgggagaactcagcttagagcaggcattgattatttccgcctcattttgctggaaagaatcattgtgaggctggcagctgaggtgcacacaagtcagaaagggttctggcaacagcaagagatgtgcagatcaaattcaggcagtcccagtggtgctgagttcaagttcaagaaaccggaaaagaggaaaacttgggaaatctgaaatccttgcaaaggagatcaaaccaaggctctctgagggtggaggcttaggctgtgttcagtctatgtgtgtgtaattcatacagtgtaatgcctccaaaaaaaaagactgaaggaggctggtagcttagcgtaagggcttcttaaacaagactgcagcttttctaggaccccagggagcctaaggagggttgtttggctctgtccttttgcatggactctgtgggctcaaagaggggctcctctgggaatgtatcctctgattcagttgaggtgggattcatctctgttcattgatgagctctgactatcccttgtgaagacagcactgcatcctccaatgtcatttactttcacatttcaatgtagggtatagatgtgcagagaatttaactttcttctcccgtgagaaagcagcatcctgacctaactcttcttgctggatgactttcttgtcttccttcctgcacttagcaagctccatcaccatgaggattggggggacagtgaggcaggaagatgagacagagaaaagacatttgagatttgacatcaccgatcttactgttggagaaatattgtgtgacctcctccacctttctaatatccgtcttaccaaagttagctgcttgaggtggtatatgccttttacattatttgcctctaagggaaaaactcaaaagcccaaagttcacctgttagaacatagtccttgtgaggttgtatctcaagatttcctttattcttgtcaacaaactcagaataactaaagttaaagttgctttataacctctattatttccatccaaaactaacatttccctcccatacccacaaattcctcattgcaatttcaccagtacattccactggatattagctacgctgcatgaaccaagggtgcagcctcattgttgttgtttgtgttgatgagatgagtaacagagagtgcgctcagcactttaaaatgaatacttgtggccaaaatattaaagcaaatagcctgaacccccacaccccagccccaggcaaacataaattatggttaaacttccattacagagaactccacaaacatggatttgattaatttgctgagcagttcatgacccttatgttatactttgcactatgtaacaaagaagctaaatcttgaacagcaagcttattcatggcacccagccagtttccttctcccctgtaagtctaaccctctgctgcccagcacgaaggagaaatacttggagatcttagcagcatgaaagcctctttgtatcactgggattgcagcacgcatgatcaaggcccaggggtgatcaccaggccacactgctcctaagacagaggtactcagatacgtggctgaaagcctagctcaaatactgccccaggtgagcctctttgctgagtagcgctactcaaagaacacagcttcccctgcctagggaaggcagggctactggcaatagatctccagcctagcagtgatgtacagtcatggtattttaagagaacactttgaatttttctgttgcttgactgttaagcctcaaatttttctgttgcttgacttcttccctggcctccatcccccaatctgcctcccttcagccctataagcagtacaacatgctgaacgcggacactactcgcaacctcatgatctgcttcctctggatcatgaaaaatgctgatcagagcctcattaggaagtggattgctgacctgccatcaacgcagctcaacaggattttagatctacttttcatctgtgtgttatgttttgagtataaggtaagtctggagtggcacaactttataccagctcttatctctcaattgcaattctgtcttcttactcatcccctttgtttgggccatggaggcatcattaatttttctcatttctgtattcaaatccataacccatttgtaggtatagatatgatcatttcacagggaaaggatctctgccttctgcagagagaaccccatttctgttgacagagttttggcccataggatgctccagagcagcatctcagtgaagcacatgtcaaacttagctggcatcactgtggagtgtactgttttggtaactctccccatcaacggagatctcaccaaaggacatgtcctcctacctctgtcttgtccagggaaaacagagttctgacaaagtcagtacccaagtcctgcagaagtcaagggatgtcaaggcccggctggaagaggctttgctccgtggggaaggggccagaggggagatgatgcgccgccgggctccaggtgtgttggactggcccttccctgctctctgtcaagcagtttttcactgtttgtggggaggaatgtcctcccaacatgattagacaccattactttcttgagatatttacggtagtgtcagagacagcggattctgggagtctgtgtgtgacatttgtgttagccctgtgcctgtgagggaaagcgctgttctacaattgtaggaaccctgaaaacagcaccaaatgacatcttttaattaaaactcgttgatggtaaaaggtcacctctaagaatgtcagtcatggatgaggtggaaggtgtttccctcaaggctgaggcctttctatgtgacctttggctagtctatccggagcatggtcaagaaactgaacagttctggccccaagatcatcttctcgatcattcagggcactattagaatggaaccagttccctgaaatggcttcagagtgtcccagtcattcaaggattccaccacaggaggaatgatctcaaaaaggctgagcttgaatagaatgaaatccccaggtaccctcagtcttattcaccatgctcaaagtaaaacagagtgacagcttattgtattcgaagggacacagtggcagggaacttggagggagctcatagttttcagtggtggtcaggcaccctcatttgacacccatactttcatacccaataattcagtaagcccccagagtttcacaggaatcctctgctcatgagaaatgtctctctgacactcagaaaggcagaggttcttcttatattctagtctatcaatcaaagagcgggccaacttggacataggtgtggcgactttgtctcctaccagcaacctgcatggactctaattagcccgagaaatggtgctgaggcttctcagttgagcttgttatgaacttctggttatcttggagggtttcatgctaatcaaattcctatcatgcatttcttaactcctagggaacgaccgatttccaggcctaaatgaaaatttgagatggaagaaagagcagacacattggcggcaagctaatgagaagctagataagtgagtcactcggcaactttctgctacttttacctaaagtccaaaactatttttcccaggctgcttgtattactgaaacaactgcatccttccaagggttagaaaatgaaacatcattatctgtgtaaatacaattcatccagggacccaggataatcaaaggtatagggagttgtggtttccagctcttaaaaatttgtcacattgataagcatgtaaagaaaactaatatttctttagcaacctcagatggcttaataaaagcagctgattttgcagggagggtagcagggaaatagagaaagcaggacacggtgcctaggaccgtatactttcaaatcgatatttcctttctggaaatatgtacaagatatacattcagatatatttatgtcagtgctacttaaagttgttttttaaaattgaaaacattctaaatgctccagaatagaaaaatatatttaaaagttggattgccatcaaaatgttttaaaatcatcttaatgacatggggaaatgcttatgacataatgttaaatgaacaaaggcagggtagacacttggttttctagtagtgtgtggctcacgcctgtaatcccagcactttgggaggctgaggccggtggaacacctgaggtcagtagttcgagactagcctggccaacatggtgaaaccccgtctctacaaaaaatagaaaaattagctgggcatgatggcagatgcctgtaatcccagctactcaggaggctgaggaggaagagtcgcttgaacccgggaggcagaggttgcagtgagccaagatcgtgccattgcactccagcctgggtgacagagcaagactccatctcaaaaaaaaaaaaaaaaaaagaacctcaaatctctgatgacatatagtcaatgtattttttaaaggctagaaggaaatttaccaaaatattaattgcggttttctttgggtgctgggaatatcggtaattgatgttttctcttttatactttgctatgtttcctacagtagatgtgtattataatatatattgttaccagaaaaaaaattataaagaaatgaaagaataaaaaaacctgtttggatcaaaatctatgctatagatgaatagatatattgacgtgtattgctatatatgcaacaatttagacatatgaaagctaaaagtatatatgtttgactagatagcacatgtttccgataccgtttagccacaggtagcctaatgagtcccagggtttgctgagcaaaatgtcgtagagctaaaatcacccctcacacacagttgacaaggtaggataccccatgggtgatgaagcacccatcaaagggggtatggggcagacttgattagcagtgctgttttgtaaataaatgtgagttaatatctttattgttaccacaagaatgaatcattctggttaacttatgggactttggggagtcacatttattttaaaacattaaagaaataagtatatttttattatagatgtgacttggaaacccagttgttggtatcatgcctatttgctttgggtatgttattcttgcactaaattccctggactgatttataaaatacttggatcggagagtccatacattctacttcgggcaatgaacaacaactacaaaatatgcatgccgtgggtgctacagaattgcttaggtggtttagctcatctactctactagattaaaagaagacccctaagtaggcctgttttgcctgggctgtgtaaactggtgttttggaaaacctttcccttttgcttgcaggagcaacacaatattggtccttaccacgcatggcctaccggtttgctctaggttagttctcagccctgcgctacctggtgggctgctggttgtcagagctaatgattcacatctacaaattctcaggggctttgtgctttttttttttttttaaaagggaaaccatagtaaaattataactgttcaacctacctacctggaaaatttataattataataatggtgtctttcaccctctttctgatcatttttcgattattttggctctgtttcttttagagcaatgatcttcaacttaggctgcacattagaatcacctggggagctttaaaacctgtcagtgcccagctgcaccctagactacttcaattggaaactccagcaggacccagaaatcagtatttggtaaaacttcccaggtgattctattgccaccaaatccattgttttaaaggaatagatggtaagcttttcttttcttttttttttcttttctttttttgagacaaggtctcactctgtcacccaggctggaatacagtggcacaatcacagctcactgcagccttaccctcctggcctcaaacaatcctcccacctcagcctcccaagtagatgggactacaggtgtgtaccaccacaactgcttactttttgtattttttgtagagacagggtttcaccatgttgcccaggctggtctaaaactcctgggctcaagtgatccacctgttttaacctcccaaagtggtgggattacaggcatgagccactgcgcctggtcagatggtaaagcttttaaaaaaccagattagtgttagtgatggttgcacaatatgaatgtacttaacactactgaactgtatacttacaaatggttaagatggtaaatttttatgttaggtgtactttatcacaatacaaaaatttgggaaaaaacagattaggacactctagatttgtgctgtccaatacagtagccattagccacatgtgactatcaaatgcttgaaatatggctagttcaaattgagataataaatcaagataagtgaaaaatacgcaccagattttgaaggcttattgtgaataaaagaataaaatatttcactagtaatttttatattgcttacatggagacagtattttttatcttttaggataaacaaaatatattaaaaataatttcactttttctttacttttttaatgtggttaccacaatatataaaatgacatatgtggcccccattgtttctactagacagcattgctctaaatttaaaactaaactagcagtcaattaattaaaaaggatgataaggggccgggcacagtggctcacacctgtaatcccagcactttgggaggccgaggtaagtggatcacgaggtcaggagatcgagaccatcctggctaacgcggcgaaaccccgtctctactaaaaatacaaaaaagtagccgggcgcggtggcgggcgcctgtagtcccagctactcgggaggctgaagcaggagaatggcgtgaacccgggaagtggagcttgcggtgagccaagattgcgccactgcactctgcactccagcctgggcgacagagggagactccgtctcaaaaaaaaaaaaaaaaaaaaggatgatgaggttaaaatggtaaatttgatgttatgtgtactttatcacgatataaaaatttgatggctcatgcctgtggtcccagatactcaggaggctaaggcagagcatcacttgagcccaggagttcgaggcttcagtgagctatgatagtgccactgcactctagcctgggtgatagagcaagaccctgtctctaaggaaaaaaaaaaaaaaaaacttttagatttcatttattttacacatatattatcacttggaaaatgagaaaaagtgtcaagtggcttgggaccagagagcctatcctaaacatgaaaacaagtaaaacacacagaagtacttattttttgagtcctcagtggtatgtaagcagctgcagtgcccccattattaggttaatgggacgcaagaacaggtaagtggtaaccctggcccaggacatatgagctgatataatgataccccaaccccatggtaacatcttggctactgaggcatcttggtaaagtcaattcttcatacctccctttccttgcaactagatttggatgatgatacaaaatatccctttacagcttcacttagatttcataagaatggatgggctagcaaaaaaaaccattctgattccttaaagtgaaacctaatagaggagcgagcaccaggcaatttcccattccctagtgggcaatgaccagtaatgtccggcaggatattagatcacctgccctacaggaatacagtcttgtttcccaatggaaaaggacgaaagaccccacgcacttggctgagcaacctcaaggtgatctttgggaagttaagaggctgactctcccctgacttggctctgaagctccaccctttcctaacccagccgcatcactgccaagttcacatcacatccagtctcactctctctcgcatgttgcaggggcttccccttactcagatctagcaatggttttcatgcgtgaaatacagccatggccctgaggctttaggcaacaatctgagaggggagcttaattgctagtagcaactaataactgcttctctacccatagtgttatttttataattgtcctcatcattattaataatagtggggatgaggatgaccaggaaaccttacctagacagttgtttcgacaagacatgaatcacagaaggcacctgcactgtagttactcagggccagttgctctgttttcatttcaaggttgactattttggagatttctttacaccttggtgtatagattgccatcatgggaacctggccaggtttgacatgcgctttaatttgacctcttgttgtttcctagaacaaaggccgagttagatcaagaagccttgatcagtggcaatctggctacagaagcacatttaatcatcctggatatgcaggaaaacattatccaggtgaggaaaacaaacacccaatctgatttgttggccatgaatatgtttactagaataaggacttctttatgcaaaattgtgaaagacataaatgtgatcccatagtaccttttttaaaaaaatgaagttgagaagtttactatttacaacagtgtctaccttataaattccagagataccaaacattcttctggcttctttgacttagggcttacttggagagggttaggtgtttggccagctgaccctcttggttaaatctgtgtgagtatgtaccaagtttataatatggatgttgggtttatcgtttagtatctagaacagtagtggtaagtagaattttttctgatgggtcaactccagttgaatgatggtcactgtctgatatgggagctatgattatgactaggctaggtaaaaagagtgctaaatttgacaaatgatgtcttctttggacttaaatttgttaaggaaagtcatttgtaccatgaatttgccatccctgctgtagaaaaatatagctttgtgaactttgtaccatactaattttatcttctatgtgattatttccacaaattcccaagctgtctaggtaataatgagtttttaattaccctgaaaaatgagttcttacatgtttccattgagaagtcattcattagagtaggtccaggattgcttttagggctagaagaaatatcgttgaaacacagtgaaatcttaattctctaacttttgaattgtctaaaatcaaagtaatcatcatacaaaaataaacacaaaaagtatgtgatatttttgttgactttaatatctttgataacttaaatgcttggtatcacatttaccttatctttatatagcacaatattaggtgccaaatatctatactagcccccaaatatatttgcagttttcaaagaaagctgaaaccttttgttattatccttggtgttgttagtccttctgtaggtgataaacaagcttctatttagaaacattgctgccaccaagcagcccctgttgtactgggaagcccacaattgtgttttgcatcccataaggaaagctatgtcttgtatacaaagaaagaactttccaaaagatgtgacccaggatgagggagatgggccttataccttcatttaggaacccagaattaggtataaatcccaaactcattggaagcattgaaataaagccatttggaaataggtcttcagttcccatggttaatggatgatacccatggtggctcaccaaactcttaagactcaccactggacatggaacatcagcattactgagctaattgtcaggaacatccagttcattggcacagtgcagggattcaatgatgctgttcttccattcccccaggcgagctcggctctggactgtaaagacagcctgctgggaggtgttctgagggtgctggtgaattctctgaactgtgatcagagtaccacctacctgactcactgctttgcaacactccgtgctctcatcgccaaggtaaacttgggatgcttgttttcttcctcttaattaagagtaagattctcatctagcttcatacttctctcttcaggtggaccaaaagtcacagagcatattaagtggcatcacagtaaaggtcttaagtcttcctaggaagaaagcagatgccctgattctgtgggaagccaccatggagaggaaaagcagtggctcccatatttgaagtgtggacctaactctagaagtttaaaatggccattcgctgaaggtctatgacatgagaacagagatcaactgagtgacttagcaatttcactctttctctgtaatacctctgctgagtgagattaaatcctctatgtgacgcccattagtcttacaaaatgtcatgccataaaatgccaggaaggtcagaaatgaatttctcacggcctgaggaatgaggattatcctggggtaacatgcagattatttttccctttatttatttatttatttatttttgagactgagtctcgctctatcgcccaggctggagtgcagtggtaccatctcagctcactgcagcctctgcgccctgggctcaagcgattctcatgcctcagcctcctgagtattgggattataggcgtgtgccaccgcacccagctaatttttgtattattagtagagacagggtttcaccatgttggccaggctggtcttgaactcctgacctcaagtgatccacctgcctcagcctcccaaagcactgggattacaggcgtgagcccccgttcctggcctatttttccctttattgaagatctcaattggtgccttctacatggggtcttttaaatttaaaaagtaaaattcttctgctcatccttctcaggaccattttctctttcttcatcaccagtaatttcccaggaacccaagaaactcaggtttccttccatcatagttgtgatttcaccagtgaatgcgacctggctcacagtgcagttgataacacagctctgacccttttagctggacagttcattattaaatctcaagtctactccattgcttaaatccatcttctgattcacatagctcattatctttatggaataatgcattaactcttctaggctttttgcttgtccaaatggacatttgcatatttcaacggtccagaaagtgtatcaaactgccaagtgatgcctaatggccctttatgtctctcctagtttggagacttactcttcgaagaggaggtggaacagtgtttcgacctatgtcaccaagtcctgcaccactgcagcagcagcatggatgtcacccggagccaagcctgtgccaccctttacctcctcatgaggttcagttttggagccaccagtgtaagagttcaaaccagctgagtgacctggaatcagtagagaaaaattgatgtaaagcatcagctgcgaaaaaaaataaggaaattttgcagtattgcagtttacttctgtcctgtgagaaagaaacaattgagtatgtagatagatagcagcttccattttaatttgcatctaaaagtgaattcatcagataaatgcagtggtctctatcagtgtgtttctaaaatagacagccaggggccaggaacgatggctttcacctataatcccagcactttgggaggccgaggtgagtggatcatttgaagtcaggagttcaagactagcctggccagcatggtgaaatcctgtctctactataaatacaaaaatagccagatgtgttggcgcatgcctgtaatccaagctacttgggaggctgaggcaggagaattgcttgaacctgggaggcagatattgcagtgagccgagattgccccatttcactccagcctggacaacagagtgagacttcatttcaaaaaataataataataaaataaaataaccaggtgcagtggctcatgtctgtaatcctagcacttcgggaggccaaggcaggcagatcagatgaggccaggagtccaagactagcctggccaacatggtgaaacccccgtctctacaatacaaaaaattagccgggtgtggtggcacacacgcccgtaatcttagctactggggaggctgaggcacgagaatcgcttgaacccaggaggcagaggttgtagtgagccaagattgtgccactgtattccagcctgagaccctgtctcaaaaaaaaaaaaagaaagaaagaaatggaagagtattttagattaaaagttatcatctgtgggggaaaaaatacaatagacaggttagaattcagaagagtgtttcctgtttctaaattctgactagctagtgccagaatgacctgtggaagaggattttaaatgatcggtgtcatctaacctgagttttattttaatattttatttatttatttattgagacagtgtcttgctctgtcacccaggctggagtgtagtggcactatcagagctcactgcagccttcaactcctgggctcaaatgatcctcctacttcagcctcccatgtagtaactgggattacaggcacgagccaccttacccagctaattttttttgcatttttgttgagacagggtcttgctgcatgcccaggctggtctagaacacctgagctcaagtgatcttccctcctcagccccccaaagtactgagattataggcatgagccatcctgcctagccaagacttgagttttattcaaagctacgaagactttggagttcagctttattatagaacagtcaagtttgctttagtttgtctagattttgataccttctttggaatttccatttgtggccatgttaataagtatgctcaagtgatatataaagataaattggcccatggaaaaaagtcagcctcctccaaatgtattagggatgattatttaaaagacattcctcaggggaccttgaggtagccatgtttttccatgggcctgtaaagaaagaagaaacaaaaccttgttgcttacccggagttcaaaatctcagaaatgctggccacagaagtcccctgatttatttatttagagacagggtctcgctctgtcaccgtggctggagtgcagtggcgagatcttggcccactgcaacctctgcctaccaggtttaagcaattctcctgcctcagcctctcgagtagctggaattacaggtgtccaccaccatgcccagctaatttttgtatttttagtagaggcggggttttgctgtgttgcccaggctgatcttgaactcctgagctcaagtgatccaccctccttggcctcccaaagtgctgggaggctgagccagaagtccctttcttttaataaagtttaaataaagtcccaagaagaaactcttggcacaaaaggatatactgtattcttggacccaactttataagaatcttccagcttgcagcacaaaggcagcccagtcctcaatgaaaatttaaagggagcctgacagatttatgtgagagcaatgtccatttaaaccatttaaacaacaatatgaatgttgtgcaaagtgtagctcccatttcattgagagaagaggaaataattaagacggggcaaaggaaacactgaggagttgtttgtgtctggccatgctgctttcagttatctactgctaagtgtgtcttatttacttcatcttttttttttttttcactgatgcagaattttgcaagagtaaagatgcaagtaaccatgtccctggcatctttggtgggaagagcaccagactttaatgaagagcacctgagaagatccttgaggacaattttggcctattcagaagaggacacagccatgcagatgactccttttcccacccaggtacaccgaagcacataccttgtctcatgcatgagtttgggatctgccaactattgtgtatgtatgtatgtacatatatacacaatttatatataaatatataacatttgcaagtatttattgtccaatatgcatgtgctctcagcactctgagaggttttaaaaagaaatacatccatcactgtccccagtctcaatatgctaacagtctatttggagtgctcagtctcaaaacaattaggaggcagtacaagacaagtgatacataagtgcaaactgtgtggtaaggagctaaatgctatggaaggttagaggaagagaggtcgtgatcaataaacaatctggtggccaggaaagcctgcagggagggatgacactaaaggctggggtaggattccgctaggcaggggaaaagtgagggggaaattgtgagtagttgaaacaatgaattgtttgtatctgtagggatggtaaagggaccagcttgtctggtgaggggtaaggaagggccgagtttgagagagcttgtaaacaaggttgtcctaaggaaatgtgtaaggacagtcatctcttccatgtccattacgatgaccgtggaactctagcctgtcccatttgtcttttaactccagctcctagcctgctctatggtagggtcttaattaagtgagaatgaatgaatgaatgttttcttttattcccttagtctgagaaccctatttccggagtctgttttgccctctcgggcaatgttgcatcctcattctcagaatctttttcctctcctctacatcaaatcgttcctctctcatttcatcttgaccatactcctttagttccatcatttatatagaggtattcaccaacaagaccaatcaaactatgggcagtttaataaaggtcttcagtgccttcacccaatgaaatgactctagtggtagaaattttaggagccctggcaagctggcagaggggaacggggataagacaacattctgtggctgagttacctgccagggtctctagatcaagccatagtctctccctgtttttgtactgcaggctcccctggacctccactgttggttttataattaagaataaatgattacaagaggttctaaaatctctgaagccctgggaagatccaggaggcttctgagacatggaactcaagctgaggtcctaagctgcttcctacttggtataaaaatccctgatattccagagtagagtttagaacttttcaggttacaaataactgaaactggttcaaactaatttaaacaaaaatgttggagatagagatagtatgaggattcaggcagatttctggatctcaagggccaacacacatccaggtctcataaactcctgggctggcgaagatgaaaactacagagtcaggtctagatgactccgccatccctagtctctgctgccctctgatccaacccttcccatggcttccccttgcatttcaatgtaatcctaactcttcacctgggactacaaagctaagattattttgaggcttacactttttgcaggtggaggaacttctctgtaatctgaatagcatcttatatgacacagtgaaaatgagggaatttcaggaagatcctgagatgcttatggatctcatgtacaggtaagctttcctgacacactcaagggacaccatttgggggtcgaggatttgtcactgtggagttcttactaatgtaatgatcacagctaacatggatatagtgatttggatgatagccaaataatatatagaaattaaacattcagagtaggttaattcatatgtaagttttcagaaggatctccctaatttaaagtgaggcataataatgttattaaatataataacattattaaatataataacactatcttctacttaccacagaatcagagaaagaataattaactgttataggaattattttccatatgcttttgttccaattatattcagacatacatatatagttttactttagaaatcattttttacgcgtagtttaaaagttggtcttccagtccttgttcaggagaaattacttacagaggcaaaattgttctgatgcaacatcatacaaagggcagtacttttgtcttctgttttattttgagagaaaggaaagaaaaggcagaaatttgcctgagagccattaaaatagacatcatgttatcaggtattttttccccataaggcttttactaagtactatttcttggaggtcagcacagcttaaacatggaataaaaatagttggactaataaatgttttcttctgtctcgttttctggaaatatagggcaaaatctcaggtggaggggtacagggaactcttggggagaaaaaaagaaaaggtcacacaaagtagaagaacagtgtcattaacccactgtcctcaaaactacttctcactcaatctgtcttcagaattgccaagagttaccaggcatctcctgatctgcggctgacctggctccagaacatggcagagaaacacaccaagaagaagtgctacacggaggctgccatgtgcctggtgcacgccgctgcgttagtggctgagtatctgagcatgctggaggaccacagctacctgcccgtgggcagtgtcagcttccaggtagggtgtgtgcagcttttcccttagagcagtggttctcaactggggcgattttgtcccccagccccagggacatttggcaatgtctagatacatttttggttatcacaactgggatgggtgagtaggtgctactggcatctgactggtagaagccaggatgctgtgaaacattctgcaataggagagctcccctgacaaagaattgtctggccccaaatgtctgtagtgctaaggttgaaaaattccaagttcatacattacatttgcttcttctaattgctttcccatcgtcgttgggttttttttaaattactgtttacaataatggcacctagccattattaatagcactttaggagacatttgcaaacactttcacatgcatggcttcatttgaacctccccgtaaagctgtgaggcaggtaggtagggaaggcggttattattcccacttcgcggatgagagaactgagagagcaagttttctaaggtcacttaaactctttttcaaagacttgtagttgacacagtatactgacattgtgaaagtttggaaaacattggataaatgattttcctcctggcccattcatttgattccactcttcaactttataggggcccactctccaatccaaaaatcaagaaagaatcaaattgacctgagaagggagacaaaaggctgaatcagtaccttcttaggataagctgaaaattacccacatttggcaaagggaaattgtctgccagacctaaaagctggctcggatggggatgctcagtggccacttaaagtgttcttactgaatagtttaatagtctttagagagagagaaaataaaaaagcacaatgttgggtactttttttgtaagagacatagtttgtagagatgaccatccctgaaaccatgaacaatatagctacagtaatagagtgtttttcaagccagactcacgaagtcatttacaagggtttgtattattcttgtttgaatttacatggctgattttatgaaaagctttgttcttgttattgttcttcaacacaattttgtgatgttgtatgaaccagaaagaaagaacaattcaaagtagcttccccaggcttagagaataagtcactgaaactatgctggtgcagccaagagcttctggttttccagaacacagcaaagctgggtattgcctcctatgaataactcctcctttcttatggtcctcaagaacaaaaatagtcattctgtgatttcatgcttggcaaatgaattttcttcttaattcagaaatgtttgttataaaagctgataattaaatctcatccaaaagcataaaaataacacctgatttcaaatcacatagaagtgtacaagaaagttataaaagttattttagatgtatttgcttcttttctcaaatttattttgaccatgtgatactatcaaaaataaatattatagtactactctttcaattcccaggaaattgtaaggtttagcacttcatattgtttcatttactaaattattttatacttcttttattccttttcccatgactatattttattttatatttatcacttaaatatcaattgcatttcattattgacttttatatttagtaagccttactgttctaattttacctagaattcagttgatttgctaataatgacatgccaaagtgaatcattattacacaatcaacagaaatattccacattattccgacatgggggcatacagctctatctgttcacatatatttatccattgattccttcttttagagaatatttattgaatacttattctgtcctcatgaacgttacattctaaccagagagacgtaatataactaattattccaatctttgttcagttataattatgagaaatactgttataaagaggcacaagatattgtgagcatttatggtccaggccctgtgggtcagggaagggtgaagaaggtgaaaaggaaggcagaagaaactgaagtgtgagggcttcttgatgtagaggaggcaatgagttaggtgttgtcagctacagaagagaagccaaattatattaatgtgtatgagtgaattcttacttctctcaaatgggacataccaaatcaatttggaaatgtagctggcaagtgaaaggacacccaacccagactgacagaaggtaaaaatggaatttatcagcccgtctgaggaatgtgagcctggagtagcacctgccatactggacctaggggcccaaacaatgtcagcagagctcactgtcatcaccacttcccatctctgccatctgttgtgtcagcttcattcttcacaggcttcccacaccacagtttaggtttacatctctaggttcaagtctaggagagaagagagatgcctcctttctagcagttgcagagaaagcctcagtgcatcttactgatcctgtctgaacatctgatcctgtgctcatccctgaaccagccatactggccagagaaatggagtgctctgatttactgaccccgggtcatgggtccacacctggaattatgggtgatttcttcccctaaatcaggatgccttactttatagaaggaggaaagaattctagacagcattaacaacagatgtccagtgttgattttgcaaatgctctgtgctttaattttcaaccttgttctgctccaatgaaatagagcttttggaaaagatttataaactagagataaataaatatgtgcaaggaaaataactttgaggtcactgaattccaggaaactgagatcactgaaattctgtgtcccagagtgcaatatttatttcacaactgtagatacggacacattcttagatactgctgttacttgtacctccctgatcctgaagccaagaaagtctgcagaatccttttcctctgactacagctaatgaggctacatagcttcaaatctgttcctctaatgtggaaaattgcatacattctaatagtattagtatcttgggttattaaatgctttcaactgaatttcttggatcttctgttgtcacagaaacatcataatacatagggcaggtttggaagaaagactggccacaaaggctttgagagcctcctcctatattcctaaaactacgttacagtattgcatgtgaagagatagggctatctatgacaactatgtcctgactgattgctaaggttgattcacatgatcttgctaaccaggccagaaggcagacagcttttagttcacaagccaactctgatcagttagtagtggctgactggagaactatgcttaagaatttcgagactatgtccaagctctggggaaaaagtgctacagttgattagttatgcctgccatgattacagcaataggaaggagtggcatgtgtgccacctgtttgtaatccctaaactgggaaggtttcccatttcttctgtttttcatatgcatttcttccatagctgtgagctaggaagaaaatgattcttgacctgtcacatattcactgccagggccagtgctagggtgaagaggcactcaccctcagggtcgagcgggtacaagatcagtacttccatggccctaaaagcgagtacctctctaaattttgtcttgggtttctcatttggttcaccccaaccatggtctctgcatgctctgctagaggctctaaacgcaatagtttatgtaaaggaaacaaatgcatggaaacaaaatgttcaggaagaacaaaaacacacacacagtaactgctgcaatgccatgaaaacttccttaatgaagacagcctcgcttgctgttgtcgtatgtcatggctgtttatctgagtcaactccagagtagcaacatacttcagaaaaacaccactgtaagtcagaggtccactcggtgaaacagggagcctagttaatgttaattgggtctttgccttttgaaaaccaggacaccagccctatgtcccttagggttgtttcactaaagtaactcagctgttgtgacattgaggtaagtgtcctttatacaaaatctcctaatggttaaaaagaaaaacgtgaggtttgaagaccagttgctcagtgcgcctcttctaaatgaatggcagacagatactctcggggtagaattacagacctagtttagtcacggtcttggtaaggatctgcacaccagcttcctcgtttccccattcggggttcctgtggtctcttactagtctggtcgccctgttctccaggcttatactgtggtctctttcagaatatttcttccaatgtgctggaggagtctgtggtctctgaggacaccctgtcacctgacgaggatggggtgtgcgcaggccagtacttcaccgagagtggcctggtaggcctcctggagcaggccgcggagctcttcagcacggtcagtgcccagagggcatcccggggcctggcctcccatactccagctggacttggggtgctgggaacacctggtcttaatggcccagtcagccccacttcccgaggacacgtgccagggtgtgcggggcaggggatgggcccggggaggactttgatgtatgcaaattgcatgagcttcccaagggagctgagataacctttcatcacagtgccgatctgagcttcactgtatgctcattggttgggcagcagtttcacagtattatttctatttaataggggtggaactaagccacagagaggtgaaatggcctgcccagggttacacaataaatgatgaggcatgttttcactccctcgtttttcctctcagagagaaaaaaattagggaggaaccactgggaggagagaggaggaatacacagacagtgtcttccctcctagccactgtgcagtctgaaggaccatcacagaccaggaccagcttacagaaatgtgggcacagaaaccactgagactcctctggttaacgtaatctggatctaaacactcctagtatatatactagaaaaatatatagagagatgaagtcattgagattcagggcaaagaggaaacactcttgtctattttcttttctttttttgagacagagtctagctctgtcgcccaggctggaatgcagtggtgcaatcatggctcactgcagcctctacctccagggttcaagcaactctcctgcctcagcctcatgagtagctgggattacaggtgtgcaccaccacactcggccaattttttgtatttttagaggagacaggatttcaccctgttggccaggctggtctcaaactcctggcctcaagtgatctgcccatcttggcctcccaaagtgctggaactacaggtgtgagccaccacgcccaacttgttttcattttaataatctccctcctcctttacattttaagccaagaaagtattcagtactttactatatttagctgacccaattttgttttcatctatactatactcatccttattttccagtttttatttccaagtttcctctctacaattttatttattttaattattgttttaactgtcttctctctattcttgctttccttttcaagattcagaaaatgtctaatatactctcatttttcctcaaactcaacaaaatgaattagaatcctactaactctttggaggcatacatttagcatctggctagaggaggacctctgatgaaatttaaatatactaaaactgcctttctgaattgctgttagtccctgctaccaaacttctctcctgttttttcttttcgttttgttttgtttttgtttttgtttttgaggcagcgtcttgccttgtcacccaggctggagtgcagtgatgcagccttggctcactacagccttgacctcctgggctcagcctcccacctcaaccgcccaagtagctgaggctacaggagcatgctaccacacctggctgattttttaatttttttgcagagatggggtctccctatggtgtctaggatgatctgaacttctgggttcaagtgatcctcctgcctcagcctcccaaagtgctgggattacaggcatgagccactgcactcagccagtatttttttttcccccgaaagctcttctccttacttatcgccatacaggactacttagcgaggtgtctagttcagtttgaaggctaccactgtcccaaaagtgctcagataccccttcttgccctgtgaaatactgtgatacaacaataaattcactctccagcacattgtttggacaatgacctctggttgctcttcttaagtttccagtggattaaattctctctgatgctcttctcctctttccaagggaggcttatatgagacagttaatgaggtctacaagctggtcatccccatcctagaagcgcatcgagaattccggaagctgacactcactcacagcaagctgcagagagccttcgacagcatcgttaacaaggtagccggggagcctggctggcaggtcttgttacctggtggcaggcgaccctgtcctacagatgcttagccatccttcctctccagggagtgatttatctttagcacattgcttttgctctcacctgtcaaacagaaaagggctgaaattcttctaacagaggaccaaaattccatatgtgaaaacatacagcttaaattactttataaccaggaaatgtgagaaatttttaagtgtaattaaaagaagtcccagaaatctttcatgggattccttttgttgttatttctgaagtttattccataagcattaaatttttttaaggagtaatttctgtttacatcagccataggagtaaaatgctttgttaacacaatgagagacccctgccctttgcaactcagtggctcctcaggatgacataactaaggagagctttttatattttgttcctcaggatcataagagaatgtttggaacctacttccgagttggtttctttggatccaaatttggggatttggatgaacaggagtttgtctacaaagagcctgcaattaccaagcttcctgagatctcacatagactagaggtaagaaaagtgattctgtgcgcctgacctggtacactttacaaaaacaagttagagtgggtcatcaccaaaaataaacaaataaagagttatggattcatcattgatctctacataaagttttcccctttgcatttataaaaggcaaagtagaaaggtattaggtgagatcatgaggtgatgtaatattttgatagtttttccctaatactctgtgtatgcttttcacagtttggaattttatatggtgaatatttattttgaagtctgtgcaaaattcaatcaaggtcatgtgctttcttatcaccctttccaaatattagtagtttatactagtagatagagagtagtagagtttttcaacatgaagtttagcatcttgactttgaagtaatctagccaaatgactgaatcacccctagataatggtgaggccatcctttaggtatcactggatggcacctggggtccttctgatgtggagctactcagctgtggccagcccggctccaacctgccagtgagtgacatttggtccataatacaacagaaaagtgtagcatgttgttagaagcaaagctgaaagcatggagaaaaagagaaacagcctagagaaaggtcaggacaaaagaaacacaggttataagggccaaacactaagaactcagtcaaaggtgcctccccgatgggatttggatgaacaggaatttgtttacaaagagcctgcaattaccaagcaggactggggtcctttgaactgctcacaattaaccaaagattcactccttaggctttcattgctttgaatttgtgccctcctatgagtgtaaaacttaaaacatttgtgttgcctaatggcttcgtacactctccatccatgccaaaaaagacaagagggtttatccttacttgactcaaagaagccattgcccagggtggctgggtgagttgccccaaaattgtttagcacatgagaaaaagagctagcaattgaccccagtccacttggttccctatattgtttcccctacttagaattagaggtatatattttatcttcttgtgcactgtgatttgccacaatatgggaaggctggtgacttccaagttcccagggtacagaaggcgagaagtaaagagtgtgataccccaggagatacctcagcaaatataatgatgttagctgaattagaggccaagcatacatcttatagggaagcatataccagttgacagtgctatttttatttttgtcttaggaaatgctgaactttgctcattagctcagaggaactctcaataatcagtgaacatcattctaccttgcacttgctccaaacttatttcacttccaagaagacaaagagttgcattatgttaaaataacctttataaactgttggttcttcttacctaggcattttatggtcaatgttttggtgcagaatttgtggaagtgattaaagactccactcctgtggacaaaaccaagttggatcctaacaaggtatacaaaaatttacaaaaactaaccatcaagctctaaatcccttcgttctctacccaagaatacctaatgatctcatctatctggactctccaagtcacttaaatgcagtcaaaccttttcgtctagagttcaactactaattggtcagatcttaaagaaaatatagtcaaaggcaggaatcataataggagctaccacttattaagcaccaactgtgtacctggaactgcattaggccctctacatacatcattttatttcatcctgcaacgacccctggaagtagattttgtcattcctattttagagatgagaaaactgagacatggaagagtcaagcaagtttcaaggtcatgcaagcagcagagccagtactcagacttgaggtctgttgcttctgaacccctactcttcagcactgctctttactgcctttttataaaacctttaaactctccatttcaaactcgacaacacttagtggcttccttctttaggctgcaagtattccttccatccaagtccgggatcactgtgctgttgggggaatggtaaaaacggcttgggtttgggtttcctcactttcacaagagggtatgttccatttcaccccaaaatgggtgtacagttctgatgctaacacgtggaggtggtatcagctcccacagggtaaaggctcagtcctcctcaagactgccctgacttcagatgccagcttcaagagggacccccaggccagccacgcttctgatcagccagctacaaatttgggagtttctataacctgttagcttgaaaataggagaaaacaaagcaaataataataataataataataataataatttgggagtttctatgatacctgttagattaaataattcactacaatgactcacagaattccaaaaagtactctggttactatcagagtattatgataaagggtgaacatctttttgtgcctttatttatggcttcctggctcatcagtgtgttctccaaccaggaagctccgccaagtctcagtgtccagagattttgttggggtttcattatgtaggcaaattgaatacagtctccagcccctctcctgtctccagaggtcatccagttcctaccctgtaatcacagaattggtctttttggtggccacttggcatcctgaagctatccaggggcccagcatgagtcacctcattagcatcacaaagacacccatcactgaggaaattctaagtgtttctaaagctctgtgctaggaaatggagacaaagaccagacatattctttattataccacaagctgatgctgcccactcagcccaactcacatgtccatgaatgagctttctaagttactggaaatagtgcaagtgcaaggtatcattaagggccctgggacagaggaccattcaccatctagcaaacctataaaatgaaaggtccaaactcccagttccatcttccaggatatgaagaagataatggaagaggggaagaattggccaaattgaagagtttgtttttctacatttttcagaatgctttctcacttaagacacattccctagcctcggcttgaaagcagtggctgtggtaagagtttaactaatcttcagacacacatgtctgggagatggagttggccgtgtgcccacagtgatctgtacatagcacaagctgtgtaaaatgtgacctccctcagccaaggtgcccttttcccctcttttaaaattcccagggtaggttgtgagagtttggaatgagagtctgaacccagagttacaaccagatttcattatactaagtcgtgatttacagtctgaggtcagtgaccccactcatccctttcagtgggtgagtgtcccagcatctgaactcatggtcactttttttcctaagagattgtcgtctttaatgagtacttattcgctctgtgtttgagggtggaggtgatgtgagtgtgtgtttaaatgaggcctaggcagtaaaattcagttttggtgtttagttctatgagttttgacaaacacatgtgactaccttcataaccaagatatagaacagatccaccactccaaaatacttcccgtgcccattggtagtccatgttgcaatagttccttcctttccgttgctgagtagtattctgttgtgtgactacctcaccatttgcttgttaattccccactggagtgacatttgggttgtttctagtctttgttatgaataaagttgctggagacatttgtgtacaggtttttgtatggacataagctttcatttctctcctgtacacacataggagtggggttgctgggtccaatggtagtgcagtttaactgcataagagaccgccagcttcttctgcaaagtagctgtgcattttgcattcccaccctctgtgtatgacagctctagctgatctccatccttgccagcacttgatattgttagttttctttagttcggccattcatgcttcctcataactgtgaggtagtcattgtcattctgtaaaggaaagtttgtctctttggaatagcagtttgcaaactctcataccaaggcttccactgtggatcagtttgctctgctaggaaggtgcggccggtggccctcactctccccacaggcacattcccctctccctccttgcagccccttctgtccttgggggtggagaggaggaacttctgctggccacattctcccctgcatctgtagcttttctgcactgggcagggcggtgccggcacgccgtgttcctgcatgcccctccattgcgtcagggatggccgtttgcagaatagctcatcttctccctccgtgccttttcccccttaggcctacatacagatcacttttgtggagccctactttgatgagtatgagatgaaagacagggtcacatactttgagaagaatttcaacctccggaggttcatgtacaccaccccgttcaccctggaggggcggcctcggggagagctgcatgagcagtacagaaggaacacagtcctgaccactatgcacgccttcccctacatcaagaccaggatcagcgtcatccagaaggaggaggtaatgcacccaagggattggccaccactggatgagtgggctgggtggcctcccaggaggacccacaaacctctttcacagtggattggactgaaaacaaggagggatgcacttgaaatatgattatatggttgtcctttcactctcatagtgccagaaaatcccatttaggcagctacatattttatagcactattgtatattaaatatttaatattttaaagttatatctttagtataagtgtgtttatgtatttaattataatatttaatatatatttcaattataaacttgtacaacagatatatttaccttttaaatattttatataaaatttttctatatttcaaagcttagaggtgattcaagcatagtcgtgctgttaattattggagacgggacctgcacgtgggcagccccagtgaggcggtggtgtgctgtgggaaagggccgtgtaaggtagacaagttcactgactagcttctagtcctagcttcctcctgtgattttaaacaagctacgtaccttcagtttcttcatctatgcattagcaggaaagacctctaagtacagtacaagattatactcattttattaataaaaggactggtcaagaaggtctctcaaaccacagaattgttcaaaattctacacaccataaacaacttattattctttaaaacacatatatatacacttatttgtcgtcctttttatgcagggccacagacttctctgtgactgtgggtttgctgatcacaattcagcattttcttttataaaccacacccgtagtgctttgtccatgattttcagttttgctttgtgtaagcagagtgagagcttaaagatccttgttaaacaatttgagagcagaagccttctggatgtttatgatgtttttctccccgagactttgacagcagtcttgtgcacacctaatatgacaggaatttttatagcaactcactttcataatatcttgtccaaccatttggcttggttttcatagaaagaaatctttttctttccacacccatggttcatcagtttctccattatctaattagattgggtcattaaaataacaagtataacaggcataatcaagttggtgaacaaacacagatgaattgtggtgaatatatacctcatcaggcagaagcagaaatagctgagctaactggagagtcatccagcaggtagtgttcagctgggtaaccacatcagggtgtggctttcacagaagctgaagaaagcctgaagcagtgactcagtcgggaggaggtgggtttagaagccatctgctgtacttcctatacttcttggtttggacttttgaacactgagacattctaggcataacacagatataaactcatggtgcccaaaagcatttcaaaaccttttcttttcttcattcctgccttcctttcctttccttcctttcctttcgttcttcctttttttctgtgtctctgtctctctttctctctttttcatttttgagacaggatcttcctctgttgccctagagtgcagtggcatgaacatggctcactgcagcctcgacctcctgggctcgagcaattttcctacctcagcctcctgtgtagctgggactacaggcttgtgccaccatgcccagctaattaaaaatacagagagatatatattttgtaagagacaggggtcttactttgttgcccagtctggtctcaaactgttggcctcaaacgatcctcctacctcagcctcccaaggtgctgggattacaagtgtgagccactgcaccagcctgaagttttcttggccttccttcgttccccaacaacctcaacaacagttctcagctgtttgctagggctgtagaacaaagttccatagactgggtggcttaaacaactgaaatttactgtctgcacaattctagaggctagaagtttgaaatcaaggtgccagcactgttggtgccttctgagggctgtgaggaaagggtctgttccaggcctctctccctgacctgtggacagccctcttctccctgtgtctcttcacatcatcttccctctgtgttcgtgtccagatttcctcttctcgtaaggacaccagtcatattggactagggcttaccctgctggcctcattttaacttgattgcctctgtaaagaccctatctccaaagaaggtcacattctgaggtactgaaggttaggacttcgacatatacattttgggggaacacaattcaacctataaaattcagaaaagactctaccccaaaccagcagaacttagcaaatagattgattgacccttaaaagaattccatttactggaaattcaccctcagttggagaaggcacaggtgatatcaaaagcctgtgttatgatgggggagaaaatcttgagtgctgtgcttctactacagctttctgcattgtaagttgagtaacatgaggctgtgtgcggtggctcttgcctgtaatcccagcactttgggaggccgaggcagggggattgcctaaggttgggagtttgagaccagcctggccaacatagagaaaccgcatctctactaaaaatacaaaattatctgggtgtggtggtgcatgcctgtaatcccagctacttgggaggctgaggcaggagaattgcttgaacccgggaggcggagattgcagtgagccaagatcatgccattgcactccagcctagacaacaagagcaaaactccatctcaaataaataaataaataaataagtaagttgagtaacttgctcagtaataggaaaaggcacctgacagggtagaaaaaacatggactttgaagatagacatacttgtgatcgaattatgacctcctcccttactacctgtggcattctgtggaacttaaccttacaaatccccctttgactgtaaaatggagagtataaagaggttgttgagaggaataaatgctaaatgtatgtaaagttcctggaacataaggaatcaagaaatgttaggcccatctttctttttaacctgttaagagtattttaaattactctgaaagtctttccctagctgcctcttcaaattcaggtggcctctctgtcatagctccaggcttgtccatagcttatgagaccagacagtgacttccctatgtttacgtctcatgttcagtttgttttgacaccgattgaagttgccattgaagacatgaagaagaagaccctgcagttagcagttgccattaaccaggagccgcctgatgcaaagatgcttcagatggtgctgcaaggctctgtgggagctactgtaaatcaggtaagcaaaaccagaggtggcagctcctctggttcttattatttaggttgtcattatacgtctgcacccttcttccttggggttgatgaggactttgatccatagacaaacacagaaatgttcctacacttaacctgaacacctgtaaggtttagaagacttttaggaaacctcttccctttcatgtaacaaccccaggtaaaaaagaaatcctagagatgagtggaccaggctttaaggagtaccactttctcagaggagtctccacttcggggccagacctgacaatatgatgcaaatctggagtcatgttgaagaatgcttagtcatgaccaattcacgcagagtaattgcagggcttgagactcacctacaaatgcctataggagagaaggaaaaggatctagaacatccaactcttggctcagtcagcagatgaacccagcatgccaaggaccttgacaaccaggaatgacctgggacctgacttcttaggctacttcagacaagactagatcttcctatcagacttcttagaacgctgactcccaagttcagcatggtgctcaagcagtctcagatgaagggaggtaccagcctaatacctctgtccagtgggcctccttaattcaaatctagatctgttcttgtccacacttccacggcagttattcagtgagcatcatgagtcttttctcattcagcgtaattggatttccccacaaaagttctgagtgtacttgacatcaagggagcagaaacagagaagagaaatgcctattacattcccaagatcaggaaaaaaaaatgaggaaacgtttgcctttgtaagtgccaatcctttgataaaatggaagactttccaagcccacaaccatggtctatctgtacacgatggatatctctgactcaatccagcagttatgcaaaatgatgtttgccatgaaggcaactagataagtgaacaaaaatgaatagatcaaggcaatcctgatttttagaaaagcaactcaaagcacataccatttgatgtagttgtattacacttatatatgaatgaaaatctattattagtagtatttgattgataaaataatattcggcgccaggctcagtggctcatgcctataatcccagcactgtgggaggccgaggtgggtgaatcacttgaggtcaggagtttcagaccagcctggccaacatggtgaaaccccatctctgctaaaaatacaaaaattagccagtgtggtggcaggcgcttgtagtcccagtacttgggaggctgaggcaggagaatcccttgaacccgggaggtggaggttgtagtgagctgagattatgccactgcgctccagcctgagtgacagagtaagactctgtctcaaaaacaacaataaaaaagaaaataaatttgggctgtgtatggtgcgcacgcctgtaatcccagcaatttgggaggctgaggtgggtggatcccttgaggccaggagttcaagaccagcctgggcaatgtggcaaaatcccatcactacaaaaaaatacaaaaatagccaggtatagtggcacacacctgtagtctcagctacttgggaggctgacatgggaggatcacttgagcctgggaagtggaggctgcagtgagcagagatcatgccactgctctctagcctgggtgatagagcgagaccctgtctaaaaaacaaaaacaaaacacacacacacagggaaaatacatttatacttctgagtgttcctctaaaacttcagattcctcctaagaaatcaaaatttcctgagatgtccaagaccttccttatttttttttgtttatttcaaaccaactacaaaattaaatgttcaaactaagaagtcactccaatattttctcccaagcaatttaatttccttcatatatgtatgaatatattcatatatatgtgtgtgtatatatatatacatatatatgcatatacatatacatatgcatatacatatatatgtatgtgtatatatatatgtgtgtgtgtgtatatatatatatatatatatatttttttttttttttttttttttttcccaccagggaccactggaagtagcccaagtgtttttggctgaaattcctgctgatccaaaactctatcgacatcacaacaagttgaggttatgctttaaggaattcatcatgaggtaagaaggaaaatggctgggaatttcagtagagcagtggttctcaaagtgcaatcttagaccagcagcttcagcatcacctgagaacttgctagaaagacaaagtctcaggcaccctccagacctgctgaattggaatctctggaggtgtggctcagcaatgtgcagtttaacccgccctccaggtgatcctgatgcacactgaagtttgaggaccactgcagcagagcaacactacttgaactactaatgagtaactaacacgtcaactatgaaacgcttttgtggctagcatcccgtgtgcctcacaatcacttgttgtaaaacaagtatcatcatcttcctcattttacaaaagaggaatcagaggttcagagagaggagataattttacttaaggtcacacagacagttggcagcagagatgagctcaaaccaggtcttctgaatccaaatagtccacatgtccatcaatgtgctgatattccactgatgcactagagtcccagaggttctttgcattggcagtcattgtaatgttacaaatcttataatatcttatttttagaaacttaaaaacatacactgcctcaaattgagagaggcaagttctaaaaccaggcttttcaaaggtattatcctgtgacagttccccatgtcagacaagtctcatctctgttccttaattctgcagtggagctggcttcaagagcagtcagttaggaactgggtctttggtcaaagccttgtaatttattgcaatacagacagatatattgggtctcctatggtcctaaaaatatgagtatgaaggatgtgatggcatttcacctataagagaaaaggacttcagaaaaatgtgtagcaatatttctttctattcaaaaccttagagaagaatattaagtataagaatatcttcacttggcagatggggataaaggagactaaaagtttgctaaattcagtgaaaactcatcaaaatgctagcatttgtgaggttagagatatctcctccttcacaggcttttgcgagaggtccgcaattttgctgcatatacaggagacacactgtgccctgcagtgaatcacagccgcttggtaataggatgtttgtgtggctttgcgtgtttgtatttgtgcatgtgtgtgaacatactcacagattatcttgattaatgttttgatatttgaattgtttcctgtatttgacaacaattctgacagaaaaactagttgttgttgttgttttttcagtacataatacgtatcttttaaaaggctagaaaaatatttggggaattattttattattttattttattttgagacaaggtctcactctgttgcccaggctggagtacagtggcataatctcagctcactgcaacctccacttcccaggctcaagagattctcctccctgagcctcccaagtagctgggactacagacgtgtgccaccacatctggctaatttttgtatttttggtagaaatggggtttcaccatgttggccaggctgatcttgaactcctgacctcaaatgatccacctgccttggtctcccaaagtgctgggattacaggcatataccaccgtgcccggccctattttttattttttgtggagacagggtctcactatgccgtctaggctggtcttgaattcctgggctcagagattgggggcttaaaaaaattttttttcatatatttttatttaaaattcattatggttgaatgcttccaaagttgactatgccccaggacctctaaaaggacctatgaaatgtttgaagagcactcactatattccaggcatgatattagttatgggactacagagatctggcttgttcctctgttcttaatgacaggacatagccctgcatggctgaataatagaatgcagcatatgcacagaactttaagaatgactaactacaggactataaagatcagaaaagagaaatcagtttcaggctggagcatttgtgggaggcgttatggaaaaacaccacttaaatcttgtcttgactatatacgtggaagaaaggcgctagtggggaagagggagccaggacagtggccctgcctgatccaaggtatcactttcagctgctttagttacccatggtttgaaagtattacttacaatatgatattcagagagagagagagagaccacattcacataacttttatttcagtatattgctgtaattgttgttaatctcttactctatctaatttgtaaattaagctttatcataggtatgtatgtataggaaaaaaacataatatatgtagggttcggtaccatccgcagtttcaggcatcccctgggggtcttggaacctatccccgagaatgaggaggactgagtaccactgagtggaccagcaggaccacgagactctgtcaggaatgcctgtgatgcaccgggttcctctaagtccagctggagcagcgtgttctcatgagcatgctaggacaaggaggaaagattggaaatatgataatatcagtaaatgaggctctgaatacaatttaaatgtttaagaaaacttgtcaggagagtgattttcatttacttcagtttgcctcaattttttctactagttataaatcttgcaatccagtatctcacgggtatgatcctttccatgacaccacctaggtaaaatgtacttacaaaatccctactaaacatgcgtttctcattagctcccagccccaggaaaagttactccaaaaagaaccagtgcccagtaaaactagtcccaggcaagagatacaagaggaaatggactttcctaggggtcgctcctttaacaaagtcattagagtttcaataatgaggctatcattctccccagatggcctacagaaatgttggattttcaaaatcaaattcaccattttaaagttgttctcctacccttttaatggtgattccacatgggaaccagtcccacctttctccccactggctgggctgctgcattgttctaggaggccaggagactgtccatgcttcccagacttcactgttcttacacgtcacctgaggatttgtcaaaatgcagattttggcctgatgcagtggctccgcctctaatcccagcactttgggaggctgaggtggaaggactgcttgagcccaggagttcaggaccagcctgggcaacatggcgaaactctgtctctttaaaaaaatacaaaaaaatacaaaaatttagccaagcgtggtagtggtgtgtgcctgtagtcccagctactcgagaggctgaggtgcgaggatagcttgagcccgaggaggtcaaggctgcaatgagccatgatcgtgccactgcactccagcctgggtgacagagaaagaccctgtctcaaaaaaagaaaaagaaaaatgcagattctgattcagtaggtctggggttggtcctgaagcactgcatttctaacaggcccccaggtgatgctgctgctgctacactggaccaaactttgagtggagagcctgcaaagattgcttaatttcctccctttcacatttctccctattacctctccctccttccctgagggcttaatctcttaggccatccttatcatcatttaccacttttgccgtctgcttcctcccaaaaaataaataaataaataaataataaaataaaattttaatggcaaaaaaagaagttgtaaatctcaataaaattatgtgagaacaaaaaaaaaagcaaacatgctcaaactgctgcaccttgaaccaactatagacgtcagttcatccattcattcagcagttattgagctcctactttgtgccaggcactgtgctacatatgtggaaggatgaagtcccaatatcagtaggacaaggctacagacaaaacagtactgctgctcattattcatctctatgtgcaaacacaacagatggcctgccctccacttcattctacagagatcagaagtcgtgggtgagagtgtgctgatggtgcacaactgtgtaaattactaaaactcatcaaactctaaacataaaatgggtgaatgttacggtatgtaaatcataccctgaatacagatagtagatgaggttcctctgttgcttaattgcttctcaagtccaatctggaagttacagcttttaatgaatagagtaactattttttcacgttgtttgtgctgtgtattttctcctccactctgctaacagacagcagaggtgacgcagaagtggaaaatatttggggcttgaacagctctcaggtttcccctttagtaagctccagcttctcagcagacttgggctgtagatcgataagcccagatttccaaggtgaccataaatgagtctctgttgctgagagctaatagcggaaacatttgcttgccaggtccactgcgtctagtgccaccacggggcagcgacctttctgactcagctgtagtggaagcagaaacagccataaagaatcctggcagcctgatttgctgcagccagtactcatccagccagtcctgcaactcttcaaactgttaccaagctgggacctcaatcagcttctgtcttttcctgcaataataaaaaacatctcgggttcagaagccaagacaagaagatagagagatacaatcttctatcttcctcttctgctcccccaaacaccccgaccatttagatttttaaattttcttctttatacttatctggactttctcattcttataaagactaagtgatgttaaatttgtttttaatttaaataaaagatagtagtactcactggcaccagttacagcttgcctttaagagaagtagtttcagatacaccctgaaagggttctgcagcatatatgtggtcataggctcagaaaacaggctgttgagtggtggcgtttttaaactggagttggggtctatgaagaggaaggagaaggaatttgtccgagtagccaaaggacaaccaaatgtgtagagtgtaggtggaaaaagaagcagtagttttaacttgagaccaaggccatatgcctggcttatagctggaaatggggaaatggctttcctaggcagtatatgtggcgttggggttgggaatatgggcactcaagccagattgcctgagttcagatcccattctgcctcaactagatgtgtgaccctgagaagttacctaccctcggtttccccagatgtaaaatcggaataataattgtacctctcccttgcagttagtgacagaataaaatgagttaatacatggaacttagaataagacttcatacatactaagggatcagtaagtgtaacattgttcagtggggcaaataggggactgatggatttgagtgggaaatagagaattaatctgacttaaatacggagattgtctatccatgatttgtctgtctctataaagtttgaatcataagacacagtgatgctgatgagacattggcctgggagcagcaggattctgggtttatatccagctgtgctgtcccacaggtatgtgactggacagggcacttcacctctttgcatgttagtttcatcaactatgaaataaagagactagaatacagcatctctaatagtttatcattctcatattgtacaaatagttcatttacttagcctgggtctgtcaggcataataacgctaccatgtgctctggcttcagctgtgtgcagggactcttctgaacatttgatatgtttcaactaatttaatctttacattaatttatgaggtaggctcttatcacccacacatcacagatgaagaaactatgacatgaagaggttaagtagcttgtttaaggttgcaaagccagtaagcagcaaagcgggattcagagttgagcactctggctccagagtccatcctcttaattgccatgctgagctgttccctctagtgactatattcagttgctagtaacagaaggaagagtagcttaaataagaaatttatttttctctcacattaaataagattggaggtagtcgatgtagagctgtgtagtggcctcataaagtcatcagagaccctggttcttttccaatcctttgccatgccatcctggttctagtgtacccattctcgtggtcatgatatggttgctagggctccagccatcatgaccacatctaggcaagtcaggagtagaaatgaggaaacagcaaaaagatgtgcccatttcccagtgccttcacctatattatcagcgatccctacctgcatgggaggctaggaagtgtaagttttcaggtggtcacactgcctggagttctgccagtagggaagaaagaatggatattgagaaaacaactaacgaatgtttgtctgccacactgaggaacccatgtatgggctgtgctgaaaaaggggggccaaggctgggtacagtggctacgcctgtaatcccagtactttgggaggctgaggtgggcggatcacttgagctcacaagttcgagaccagcctgggcaacatggcaaaacctcgtctttacaaaaaatacaaaaaaaattaaccgggtgtagtggcgtgcctgtagttccaactgctcgggaagctgaggtgggaggatcacttgagcccaggaggcagaggttgcagtgagctgagatcatgccactgccttccaccctgcatgacagaatgagatcctctctctaaaaatagagggggtaccaagagatgcagggggggtgagggcagcatgactactctctctgtaggagaccttaactctataaatggaggccccaaaatgttactgccatcaaaagccaggaatccttttctggaggcgtaacttcctgccctttctaatccctatcaatctggtttctgtagaactgtgactgctagaaaaccccaggcatatttgttctaagaaaatacttgtgttcggtgaatttaccaacaaagggagcatcagaggatgtgagggaagtctggaatggttgtatcactaagtgagagcagcacagatgtttgtggacctattgagaatgttacagataagaccatttttgaaaagttgtttgcagtgtcattttatgatcttgtgtacattttccaagcgatgtggctattctctaggagggatagtagaaattatttcaattttaatcaaataacctagagaatataacccaaatgactgaaaggaagaaatgtagaaaaagtatataaaataattttttgcattataaaagtttaaagacataaagtaatattactacataaaatctaagttttttactccagctattaatatgtttttctttataaaacatcacatttattaattgctgtgtaacaaactacctcacaatttagtggcttaaaagaaaatttaattattatgcatgtggtacataataatttttgctttcctcatttctactcctgatacttgcctatgatgtggtcatgatggctggggccctagcgaggtgtattgtggccatgagaatggttttgctgcaacttggggttggctgggctcagctaagcagtttttgcctggagtctctcagttgcactgagacagtgactaggacttgaattacctgaatgcttcctcactcatgtctggtgtctgggctgagaatactcaaacagcaggggctcctcctctctctaactctccttctctccacatggtctctcctgcatgacagctttagggtaactagacttgtcacaggatggttcagaactcttatagtacagaacgagagagagacagaggccatattaccttttattagccagtcacacagtaccacctccaccacatcctattcagtgtggctgtcacaaagaaccatccacctcttgatgggggcatgggcaaggttctaggagagcacattcttgtggccattttcagaaatacaatctgctacactccagaagcatctgtttgccttattatcatagcttctgatttaattctcccagcaaccctaggagattatatgagcttattatccccattttccagagaaaattgaagatttttatggttaagtcatcctgctaatgagtagcagcttgtttcaaccgcagttgtctgcatataacacatttaactcagtcaagggcacatggtgagcaatcagaaggtgttagctagctgctgctacttctgcaaacaaagactaaggagagtttagctgattttaccaaagttgtccgagtagacttccccaaattagctgttagctttggcaggactcatcccacctcctgtagcctgccaatgttataaacttgggccttgaagtcatcctgaaactgatcttattttacacatggtggtaattgtaactgttagttaagaagcaataaaaaaataataaggggtgatatagatttctcaggattcaaaggccatatgccttcccttctatttcttccctaaaaccgttaattcataaccttagctatcctataatttgcttcaattaatgacaaacataaaagataggtgaaaatccagttaagggagttctttcagattctgtgtgagttaaatcaagtccttcttctatagcaggctaattccatgatgaagctgtggtgctaagtttatttttgcctaggcaggtagctcttccttgccacatgctatcctcttcctctttgactgtcatcctgaaaatgtgttcagtgttaagaggatttgataacaatgtctgggtatctccataacttagtccaaatctggtaccactgttaggaaaataatgtaagccatattgatcacccacgtcttattcatttgaaggataatatagttattactaattattgcgtgttaggtaacatacagccattattctgtccctttaaggtttattgatttgtaagttcccttgggtagaagagtacaaaacaaaaggcaaaacttcatcatgtttaaataacgtgattttcttctttggtgtgtaccgtaccgtgcaggagacagggaaaacaccaggtttaacggtccacaagccagataaccatgatgagttctaaagattttctctgtctttaatgttcttcagttttgtcatgagaagactggatatagctctgttgttgttcattagaggatttatatctctcttcaactctagaaaattaccagctgttatctctttaaatattgtctccctctcattttccattcccttggagattctattagatgtgggttggatcttccttatatctctatgtttcttaaccaattttttcatatttttttattttttaaatctcattggtgatttccttggatctgtcatacatttacttctccaattatgtctagtctattatttaacctttaacctttccattgagttttttgtcttttagcaactgcatttttttttttttttttttttttttttttggtgagacaaggtctggttctgtcacccaggctggagtgcagtggcatgatcttggctcactgcaacctccacctcccaggctcaagccatcttcccacctcagcttcccaaatagctgggactgcagtcacctgccaccatacccagctaatttttatattttttgtagagatggggttttgccatgttgcccagtctagtctttaacttgtgagctcaggcaatccacccaccttagcttcccaaagtgctgggattacaggcatgaggcaccacacccagcctagtgactgcatttttcttttttctagaagttctgtttggtccttttctgaacttttcctggtctcttttttcattttccctgtttatttgtttttatcatggattttataccttttatttattttctttttttttttctagttacatgattacttaggattttatacattttattacctctctatattaactttggttttttacattgttttattatctctaattcttattggactaattcttttgtttgatgcatctgttagttttccctcgtggtggttggtttcttcatatggtttgtaattttttattgtgagctcatctttggcgagagtggctcatatgccctgattgagaatgtgttcctccagaacaactttatgttggtttggctgaatcctagcaatttcagtaatcttggactggcttttaagttattttctcaccttgaagcacatacagtcaaggaatgtacatttgtaacttatactatgtgtggtgcaagcctagaatttccatttctcaatatgactttcttttccataaatggccctaagctgatagcaagttttcattctgcctctctggacatcttgcagcatttttctaaaccctctttcatagatgggatagcttttcaaggctctggacgatatgcaggtggcatatccagaatctccctttgccctggccaaggccacatcactaatcttgtgtgagctttgaagccccttcccctcagcccatagacctatacacagtcctaaaatcttaatgggcagtcctactgacagctgccttgtcaccagctcctgtgatcattctagctttgatttttctctttctttctggcacctggtgttcccctttctctttcaacaagtttttgctgtgctttcctagcacttccatatgtacgtagcaggaggaggctgaatgccatctgctctgtctgccatgttgctgtaaatcacagtgagttttttgtaagtgtaacagcttccattctgcagtgtgttttgagtctgactcttagatccatcacttcctcacagtgttatcttgggcaagcatcctaacatttctgagtttcagaaacaaaatagagataaatgctgactttttagggttgttgggaaaattaaacagataatgcatgtaaaacttcttgaaacttcttctggcacatagcaagtcagaggttctcaattctggctaggttggcttcagtatcccctgggcaactttttaacattagacatttctgggccagaagcaatggcccacacttgtagtcccagctacccaggaggctgaggtaggaggatcactggggcccaggaggtcgaagtttgccatgagctgtgatcatgccactgcactccagcctgggtgatagagtgagccccgtctcaaaaaataataaaataaggtaaaaaaaaaaaacaaacacagagatttctgggtgctacccctcagcagttatgattcattaagtctgagatagatcccagaaatctgcattttgaaaagctccacaggtgatcccgatatgccacccagtttgaaaacgttcttaaagttattcgaaaaatcgtaagtaatttcattgttctcagatttctaagcacttcaaagtcatttatttctcccacactgatattttcatctcagatgtggtgaagctgtagagaaaaacaagcgtctcatcacggcagaccagagggaatatcagcaggaactcaaaaagaactataacaagctaaaagagaacctcaggccaatgatcgagcggaaaattccagaactgtacaagccaatattcagagttgagagtcaaaagaggtaagaacagggcagaggaggcctcttcctgtgggataaagagcagcgcatggggcctagcaccttggggcatgctctgctgcacttggggagctgcagaacctcgaaagggtggaagagggtcccacagtcagagaggctaccagagtgtgattcattctgcctctgtcctccccatccctgctccttgacctctcccagacaccttggtgttggtcttgtgccagggtattcccagggctgaatgatggcctgtgttggtttttttgtttgtttggttggtttgtatgtttgttttggcacagtgtgaaggggtcgcagacctttcacttattatttgctgagttgtccatgactgatgtccatttctactgggtgatccacccccaaccctttctaaaaggctaactgatcttttcttgcttctgtacgctctctttccctctcctccctctcttttcttaatttcagggactccttccacagatctagtttcaggaaatgtgaaacccagttgtcacagggcagctaagaaaagccatcttcattcgtggagactgtggccctgcaaccctggagaaggacttgctggtacttaaaaaatgggacatttgccacccaggactgactgtacactccctgatcagccagcactctggaagctttgggatcccaggaaccatggaattattcccaaatggactctgaccagatttttgccatactggggggtggcgggatggaggatgggtactcaggcatgactgcgtatttattaaagtgtgtttttccacaatgtaccaaacaaggcataagcagcttctcctgctgactggccaatcactgcccatctgagagatgatttcctctggcccatatttgaatttattggagtaactcaaattgcctgaggaaaaatggaaaaattatccaccagtcgattcaaactgaatttcactctttataggaaggcagggcaaacttgtaggagtacgaaacattttcaataaatctacaaagggaagccttactacaattccaaaaatcatcatggttggaaatttgggaggagattatttgtgaacttgttacccttttggtaatggtggactaattgctgtatagttatttttgttttattattactgttacattaatttaacatgcatttatagaagaatacattcaaagcactgatgtaggagatacacggtacttggagcagtcagccagaaatcacagatactgctttcacttaaatggaaacaattctccgataatgctttgctttttttcttatgtcactcttgtgtactatctatttttctcctctctgggaccaagtttctttttataaagcaataatatctctgttttcatttcagaacattgtgctgtctgtcagcatatgtatatcagctacaaaatatattcaactttgacttcttttgacaaaggactttaggaaaaagaggaacaaagacattatttgagaattaaattatatatttttaatatgactgtgaccttgactgataataaagatgtaataagaattgcaagctaaatgtt

SEQ ID NO: 7 - DNA, 8532 bp, Homo sapiens
agaaagcgagcagccacccagctccccgccaccgccatggtccccgacaccgcctgcgttcttctgctcaccctggctgccctcggcgcgtccggacagggccagagcccgttgggtaagccgcgttagcacccgcgccgtgcccacggccccacaacggactgtaggacccgtgagaggcccgggatccaggctgtttggggctcacggactgttcgtaggggacgtgccgggcgcagaaagcaggtggcgggaccgagactagaggagcgcagtggggcctcggaggtccgggttcgctgcaacggtgggagttggtggtgggattccccggccccatgacgcctcaccaggtcccctgccgccgcaggctcagacctgggcccgcagatgcttcgggaactgcaggaaaccaacgcggcgctgcaggacgtgcgggagctgctgcggcagcaggtgcggggcccgggtgcggggcagggagtgccagggaacggaagggggtctcagttcccagcgaggagagaggaagtacccgagaaggtggagaggagatggggagggaagggggtcggcgggtagggagtccttggcgaaaagaggctgtagaaagggaccccggggtagagagaggggagacccgagggatgaggagaggttgggaccccgctgattccatcccacccctgcaggtcagggagatcacgttcctgaaaaacacggtgatggagtgtgacgcgtgcggtgagcgcggcggggcggtcgggagagagaagagacgggagacagagacacagagacagagacagagagccagggaaagctggggaggaaaagagacggaaggagatggaggctgacggagaggtggacggacgaacgggaatgggatggggtgtgtagaaacagagacaaaaagagacagaagcggtgagagagttttggggaagtgagagacgccacggggcagaaaagcgggacagagactcagagaagagaccggggagaccccgcggtcagagcgcgcagcctctggggcgggatcgcggacagcgcaggatttcgggccgccccggggcggggggtgggggggaaggggaagcctccagccccggggcgtggccatgataggctctgcccccgggcgagccaccgatcagccccgccgcttctcccccctcccccccgcagggatgcagcagtcagtacgcaccggcctacccagcgtgcggcccctgctccactgcgcgcccggcttctgcttccccggcgtggcctgcatccagacggagagcggcgcgcgctgcggcccctgccccgcgggcttcacgggcaacggctcgcactgcaccgacgtcaacgaggtgcgctagccccgacactccaccgccctgacgactccctctaccgccccccaatctctcgccgcccgggagaccccttcctccactgggagtgttcgccccgaagagcctctcacctccgggggcgcacggccagactacctccttaccgcggggggacgcccaacccaaggaccatccccgtcaccacccgggacgcccgcccccacaaccccctacatagctagtgacgcccgccccgacgactccctcaccgccaggggtggtccgccccagctaccctcctcgccgcaggggatcgccagtcccaacgacccttccacagccagggaacgcacgcccagaccccccgccaccgccgggcacgcacgccccgacgacccctgcccccctctgctggggatgcccgccctcatccttcctcccctcgcccatgagggaacagctctcctctcctctcccggttgcgcccttgccgtcatcaaggcaaagtcgtgcctgacccctgcgacaattgcttccatctcagagctccaagcactggcatatggcccttgaactttccacatccgagacactacgaggtgcggcccccagggcccagctcgaagccctctgaccctctgtggcccctcctcccccagtgcaacgcccacccctgcttcccccgagtccgctgtatcaacaccagcccggggttccgctgcgaggcttgcccgccggggtacagcggccccacccaccagggcgtggggctggctttcgccaaggccaacaagcaggtgagaggtgtgggggccccatttttggagcagaagggaagggggcgtccattttgtttaccagtaaactcctcttccagcctccttccagcgggaggggtggggagaggaggggtccgctgcgccagggctgatcggtttggggcaggatggaggggagaggcaggatgcggaggaagtgtggaggaggtgggaggtccggaggtgtctgcgtggggtggtgacctctgagttcccctcccctaggtttgcacggacatcaacgagtgtgagaccgggcaacataactgcgtccccaactccgtgtgcatcaacacccgggtaaggcccgctggggaggaagaaaggatcgcgggaggtggggcgagcggcgggcggcctgcgctgacctccggcggctccggcgcagggctccttccagtgcggcccgtgccagcccggcttcgtgggcgaccaggcgtccggctgccagcggcgcgcacagcgcttctgccccgacggctcgcccagcgagtgccacgagcatgcagactgcgtcctagagcgcgatggctcgcggtcgtgcgtggtgagtgcgggcgggctgggcttgaggcggggttgggtggcggccactccagggcacccacttacactctcccacagtgtgccgttggctgggccggcaacgggatcctctgtggtcgcgacactgacctagacggcttcccggacgagaagctgcgctgcccggagcgccagtgccgtaaggtgggtgggggcggagcggggcgggcttgggcaggagggagggcgggacttcatgaccgcgcccctcacaccttctgtgcccgcccccaggacaactgcgtgactgtgcccaactcagggcaggaggatgtggaccgcgatggcatcggagacgcctgcgatccggatgccgacggggacggggtccccaatgaaaaggtagatctacggctcggcacggtggttcactcctgtaatcccagcactttgggaggccgaggcgggcggatcacgaggtcaagagatggagaccatcctggccatcatggtgaaacccctcctctactaaaaatacaaaaattagcggggcgtggtggtgcacgcctgtaatcccagctactcaggaggctgaggcaggagaatcgcttgaacccgggaggcggaggttgcagtcagccgagatcgcgccactgcactccagcctagcgacagagcaagactctgtctcaaaaaaaagaaagaaagaaagaaagaaagaaagaaagaaagaaagaaagaaagaaagagaaaaagaaaaagaaaaaagaaaagacagagctgtgagcggggcctagggaagtgggatggggcgtggcttggatgaggggcgtggcctccgtggtctaggaggggcgaaaggttccttgaggaggagacgcgtcctcggagatttgggaatctgaggagtgtgacctttgccttctcgacctgatctcacccttaacccaccctgtcatccaggacaactgcccgctggtgcggaacccagaccagcgcaacacggacgaggacaagtggggcgatgcgtgcgacaactgccggtcccagaagaacgacgaccaaaaggacacagaccaggacggccggggcgatgcgtgcgacgacgacatcgacggcgaccgtgagctcgatgggggttggggggcgaggagaggcggcgggcaccgaagggcgggattcggctccggggcggggcttggctggttttggaagccggatggggtaagctggactagggcgccctggaccaaagaccatggtggggcgccagaaaaatgcaagctgggctgcaaggccaggaaaaacgcagggatatttggaagggaaggtggtccctgtgtcaatgccgcaggcaggaattaagaggacaagagattcgagcctggggtttaggacctgggaggtgacaactttacagatggggacataggggctcagggtggcacacacgggcacccagctgagccaccctgggagtgagagcccgtccccctcactagccttcccttggatgggaccattcattcttaaagttcctgtgggccggacggggtggctcatgcctataattccagaactttgggaagctgaggcaggtggatcacgaggtcaggagttcgagaccagactgaccaacatggtgaaactccgtctgtactaaaaatacaaaaatttgctgggcgtggtggcgcacacctgtaatcccagctactcgggaggctgaggcaggagaatcatttgaacccgggaggtggaagttgcagtgagccgagatcatgccactgcactccagcctgagtgacacaatgagactgtctcaaaaaaaaaaaaaaaaaaaaaaaaaaaaagcttccatgaagttgggactctgttccaggccagcctcaggctggctcatcctaatgaagtcattctggcctggtcccaatcttggggctctggtcccgtggatttctgcagggatccgcaaccaggccgacaactgccctagggtacccaactcagaccagaaggacagtgatggcgatggtataggggatgcctgtgacaactgtccccagaagagcaacccggatcaggtgagggcaggccagactccagctgggtaagccctctgggtgaactgcaagttggattacccagcccacagcccagcttagagcattttacactgccagagaaatgacctctcggtccgagcagcctgcggtgggggtttccttggggtcaggaggaccttggctgtgcggctgggttgggtgggaggctttctgatttcctctgtctgattatggacccccgcatgctgccctccgcaggcggatgtggaccacgactttgtgggagatgcttgtgacagcgatcaagaccagtaaggaggccacctggggtgggcgtccgggtagcctttgacaaaacgctctggagagctcattgtctctggatcccacctatccactctagggatggagacggacatcaggactctcgggacaactgtcccacggtgcctaacagtgcccaggaggactcagaccacgatggccagggtgatgcctgcgacgacgacgacgacaatgacggagtccctgacagtcgggacaactgccgcctggtgcctaaccccggccaggaggacgcggacagtacggcgggggcggggcctgcggtgggggcggggccagtgggggctcctggcgcggggtctacggtgggcgggccctgactttagcccaccgaggggtctcccacctctcaggggacggcgtgggcgacgtgtgccaggacgactttgatgcagacaaggtggtagacaagatcgacgtgtgtccggagaacgctgaagtcacgctcaccgacttcagggccttccagacagtcgtgctggacccggagggtgacgcgcagattgaccccaactgggtggtgctcaaccaggtgggagcggggtccacgtggggggtgatgggaccctagaacccccacagtgaggcctatgctgaggacagggtgcctagggctgtcacggccagcctgaggccctcctttctttgaccccatcagggaagggagatcgtgcagacaatgaacagcgacccaggcctggctgtgggtgagaagcggggagcagcgctatcctgccacggagcgggctcagggagaggggccagagaaggggcaggcccgggctgagaatgggcggggccagaagggggctggcccgggctcaggaagggcggggacagaggggcggggttatatgggcgggcccgggaggagaaggcgcggggccagaggaggggcgggctcgggaagggcggggccaagtggaggtggactctggaggggcgtggccaatggtagatggggggcgtggctgagtccgggctctgcgagtgggaatggtgcaggtctgcaggcagatcgggacccagggggcaggtttgggttctgggtgccaggttccgggggctggggctggcgttcggaaaggccactgctctctttccatccctaggttacactgccttcaatggcgtggacttcgagggcacgttccatgtgaacacggtcacggatgacgactatgcgggcttcatctttggctaccaggacagctccagcttctacgtggtcatgtggaagcagatggagcaaacgtattggcaggcgaaccccttccgtgctgtggccgagcctggcatccaactcaaggtgccagggccgtccgtgcctgacctctgcggtcctcatgccctcccatgaccctccgtaaaaccctttacagcccttagagccccccagccccctagcctcatactatggacctcaaagctgtcccagccctcctctgggctcccgcagtccccaaatcctcccagttccttgcacaaattctcaaacattctcagggccccccagtcttcctatggaccctaaaccctctcacacagccctaaacttttccttagtttccaagtccttctgcagagccccccatcctcccagaccctgaatctgtccacggactcccaaatcctctcatgaacctgcagaccactgctgccccctgtgacctatccccaagctgccatttggcccctgaagaaggcttccttgtgggtctctcatccggatccccctggccgcccaccacctgctgctcccaactgtctctccaggaaggtgtctaggggggctccggtggcccacgaggtctctgaccacctttcctgggtattggcaggctgtgaagtcttccacaggccccggggaacagctgcggaacgctctgtggcatacaggagacacagagtcccaggtgcggctgctgtggaaggacccgcgaaacgtgggttggaaggacaagaagtcctatcgttggttcctgcagcaccggccccaagtgggctacatcaggtggggactccaccctctgtggtgggctgggctggggacacacaggcccaggtgggagtgccctggccaggcaggggctgtgtgaccctggtcccctcatctgtacgataggaaagatacagggcagttagaatgagcctatgctggtccaggcgtggtggctcacacctgtaaccccatcactttggaaagccaagatgggaggatcgcttgagcccaggagttcgaggcagcctgggtaacatagtaagaccctgtctctacaaaaaagaaaaaaattaggccaggcgcagtggctcatgcctgtaatcccagtactttgggaggccgaggcgggtggatcacctgaggtccggagtttgagaccagcctggccaacatgttgaaaccccatctctactaaaaatacaaaaattagccaggtgtggtggcggggccctgtcatcccggctactcaggaggctgaggcagaagaatcgcttgaactcgggaagcggaagttgcagtgagtggagatcgtgccattgcactccagcatgggtgacaagagtgagactctgtctcaaaaaaaaaaaaaaatgccaggcatggtggcacgtgcccatggtcccagctactagggaggctgaggtcagttgagtctgggaattaaggtggcagtaattgcaccactgcactccagcctgggtgacagagcgagaccctggccaggacacagcacacagtgtgtatccagctagaaatggggcctcacccagtccctgtttctcagcctccattccatgctgctagcaagcccaggtgctctgtttagcaccaactatgtccagggcccttgatgtccaccacaccaggaaactgaggcccaaggcagaggcctcacttgctcccagtgcagcccagtcaggggtacccatcttccagggctggccactgaagctctgagagggaagggtctggcccaggtcccccaggcctcaccatgtctgaccctcagggtgcgattctatgagggccctgagctggtggccgacagcaacgtggtcttggacacaaccatgcggggtggccgcctgggggtcttctgcttctcccaggagaacatcatctgggccaacctgcgttaccgctgcaatggtgagccgagggccagcgggccgtgggcggggagtctgcacacaggccctgctggccttctcagccctcacccgcctgccctctccctgcagacaccatcccagaggactatgagacccatcagctgcggcaagcctagggaccagggtgaggacccgccggatgacagccaccctcaccgcggctggatgggggctctgcacccagccccaaggggtggccgtcctgagggggaagtgagaagggctcagagaggacaaaataaagtgtgtgtgcaggga

SEQ ID NO: 8 - DNA, 292305 bp, Homo sapiens
agtggcaagcgcgggcaggaccgcgttgcgtcatcggggcgcgcgcctcagagagagctgtggttgccggaagttgagcggcggtaagtgagccgcggcgggcgagggtgtagtggggtcttgctgggccggttttggaggcctggagtcaaggggcgagctcgccagggagggcgagggtcacagcaagtctcaggatcctcctctgccagtttctgggtggtccttcctcctccagggactcactgattccggctggcgcccttcgtctgtagccgcgtcccctcagactggttcagtccggggtcttctgacttggaagctcgtgctgatttcctaagtcagcccctcctgtcctcttggtaggcagtgctcagaatcttcagtgttggaacacgggagatgggacatttggattcccagcctggctgtgtctggatttgctgtctctggcacgttccttccccatctaagctgcttttccatctgcaaaatgggaatgataatccgccatttgtttaagtgaggaggttaaataagtttactttctgagaaagaagattctcgattccttggttacagggttagaaactaatgcacaataagaatcaatccggtaaggtaaatataggtgttagaacatttgtcagaaatagagtcaaacttctaattttataagtacagtactaacgtacatgatgttggagaagtacaagccaaaccgtgtgtgtgtgcacgtgcgtgcagtttcctgatttttaaacactggcgactgatgccattttttaaaaattggcaagtaattctggcgtttaaaaacattggcaactcagtttttacaaaaccctgttcaactgtaaccagtcatatctgtggctgtcagtttgggacctctggatcccagactccctttttcattgactacttagatttttttctctgacacctctgcccactggccagatttcttcagtgacagaaagctttctacttctggttgctcctgtttggtcctcccccagttctgactcttaggttgagctgaaagcagctactcggtaatcttagctcactgttcctccttcaggctcttggaatcacccctgcatttaattgccctatacatcattgaaagctgctagtttgtcttcctcttctcaccttttcttctctaggctaagcatatttaatgtatttgctcatagtaaacttaacagtgacagcaaattttgtcatgttttgttatatccccagcatatagagcaatgcctagcatattatatatgctcaataaatatttgttggatgaatgaataaaacaaatatttgcctgttatgtgcctggcattattgtgggcactggtgatctatcagtaaaataagaagaaaaagaaccctgtttcatggcaccttctaataatagtggtggtggtggcggtggcggcattgtcagtaagggttggtaggtgtttccgattctgaaacgtacagggtcatgggatggacagtaattggggggaagcataaaagctagctagtcagggatggcttccctgaggaagtgacctaacacttgaataaagaaaagtccagtcttggaatggctcatgttgctaaactgctttcccatcccccaacgctgctccagtcttgttaagctgcttgcaggtgtgtgtcacctatagccctttgcttctgctgcttcgaacatctccccttcctcttccatttatcttggccaactccttcctgccctcatgtgacatgattttgaaatcctttaagagctgagtactggactttccattactcaaccacaggttccgtttttcgttcccagccagcatctcattatagagaataaacatttattgagcttcagctgtgtgtctggcactgcgctgcaagctgggaatacaaaaatgagtaagatacacatccctgtcctcaaagagtttactttttttttaagccaaggagatagcaacggtatggcatgaagctattgcggaggtttggtagaggaggacttagggtacgcataagtcaggctgactcatcagagaaggtttcagtgaggaggtgctgctttagccaagacctgaaggacgaacgagatctgacaggtgaagagtggttcgaagtgagatgagcaaagggctagaggtgagaatgcatggcctgcttgtggttcactggagtgccagtgtggaggtgtaggatgagaggtgactggaaaggtaagcactagccacatcgtgaagggccctgtggacaatagcatgttacccgcacatagactttgggatccaagatagctgcgtaccaatattcccattgccactgaactagttttgtgaccctgggcaagtcacttctttctaagcttcagtttcctcatctctaagaaggggaaataaaaactgtacgaggtgatatgttactcacttgacactggtagatgataaatactcaataaacagtagtcattaatattgccaggcccagaagtttggactctaaaatgtgggggcgggggtggagagcaggacactgaagattttaaaacagatgcgacatcctctcatctgttttaaattacccaggcagcaatgtggtgattacactggacagaaaaagacaagcaggggaccagttgggtatagttgcagtgatccaggtgacaggatgaagatctggatgaaggcagtgacagtggagatggagaggagtgggaggagttgagagattaaggaggtggaatttgctggacttggtaactgataggatgaaacagaagaaggggacaagaatcaggatcctgatgacgggagggcagaaatgaatttgctgtgtggaattgagcagtaacaaaattctttgactagtgtctctaatagattaaccctgacctctgattttatttggaattcagtttgcctctgtcgtccacttctacccatggaaatgacgttcgctaatgtcttcctctcctctttttttttttttctttttttttgagatggagtctcactctgtcgcccaggctggagtgcagtggcacgatctcggctcactgcaagctctgcctcctgggttcactccatactcctgcctcagcctccccaggaactgggactacaggtgcccaccaccatgcccggctaattttttttttttttttttttttttagtagagatggggtttcactgtgctagccaggatggtctccatctcctgacctcgtgatccgcctgcctcagcctctcaaagtgctgagattacaggcgtgagccaccgcttcctctcccctttctatctcctgatctccccacccttctccagtgcgattaaggcctgattgtataatcaagggacaataaatactggaggtgctgctctgttaattggtagtcagtaggtattaccatgatcttggcagactgaggaatagcctattcactccatctcagaccggcttcagaatgatcacttttgggatttcctcacaccttcatcccagttaccatccttgaacttgctctggtttgtcagcctctctttgagtgtgtggtacagaaaggaaatcctctttccttgaggactctaaccatgcagagcaagactgcacttttcttgtggtaacctaaagccctgccagctccattatagacacattgtgcttttgacactattacactagtgtgccaccaaataggccctcagcgtggctcagccctccccatatcctcaggcagctctcttgtccatttccctttatgtcttcctcatattcattcctctcctcaacctcctaccttgacttttgctccactaagttgcagccattaattaaggcatcgcagcttcctcttctatcctttaccaactgatctttagctgaccctatccttttgccttttattctaattctgtgaaagaaatggtgttttaagactaagtcctctatttgtgcttgagatcccatcgcctcctttgcctcaaggactgggttccatcatttgttcattttcttttctgtttcatcaacccttctcatttaaatattctctgtttactctcattttggaaaaaacaaaaaccctccaattaacctatgctgcaccctgtcacacctcttttacccagccacctttcttggaagagttatctagagttgcttcctgtacttccctaagtcattgctaaaatcctgctctcgtcccaccactccccaaagtcatcagacctcgacattgccagaatacctgaccacttttccttcttatctttcttggcacatctgacattgctgaccttgcccctcacttaggaaaacccagtcctactttgtattatctctctggccatttgtccctcaatttccattgtgggctcctttcttcccctttgtccctcacatgccaatttttgccaagactctgccctctactatattcttttcaaccgcagcttcaaacttgtttatatgctcatgacccctgttctgtatcatagcccgaatctctcctgagtgctaccctcaaactcaaacaagtctaaaactaagctcctcatcttccctttgaacctgccgttctttctccattcttgaatcttgccaattcctctcctttcatttagtcatccaaaacagaaccctgagagtcatctcagactcttcctctggtactagccctcctttccatcttccaagtccaggtagtcatcagagttctatagattcgactttgttgctatctcctgactcacatctcctccatttcctcccttgctccctcatttcaggctcccctccctttttgcctgtctttctgcacagcctcccagctggttgccctgcctcagcagtctggtcctcactgctgtggattgcctttactaaaatagagatctatgcagaaatacagttgcatagcttttcacataaggctcttcatgatatggcctttgcctgcttttatggcatggtccatctactctgccccatgtgcctctccttgctgccatacagaactctatcaggggaacctgcccccaatatttcaaggtatgttctttctattttccataagtgtcagctggctgagaaataaagagaaagagtacaaagagaggaattttacagctgggcctctgggggtgacatcacatattggtaggactgtgatgccgacccgagctgcaaaaccagcaggtttttattaaggacttcaaaaggggagggggtgtgcgaacagggagtgggtcacaaagatcacatgcttctgaggaaacaggacaaggacaaaatcagaaactcctgataagggtctatgttcagcagtgtatgtattgtcttgataaacatcttaaacaacagaaaacagggttcgagagcagagaactggtctgacctcaaatttaccagggtggggtttcccaatcctagtaagcttgagggtactgcaggagaacagggcatatttcagtccttatctcaactgcgtaagacagacactcccagagcggccctttatagacccccccccccccaccaggaatgcattcctttcccagggtcttaattattaatatttcttgctaggaaaagaatttagtgatatcttccctacttgcacgtctgtttataggctctctgcaagaacaaaaatatggctgtattctgcctgaccctgtaggcagtcagaccttatggttgtcttcccttgttccctgaaaatcactgttattctgttctttttcaaggtgcactgatttcatattgtttaaacacacatgttttacaatcaatttgtacagttaacacaatagtggtcctgaggtgacttacattctcagcttacaaagataacaggattaagagattaaagacaggcataagaaattataaaagtattaatttttggaactgataaatgtccatattaaaatgaaatcttcacaatttatgttcagagattgaagtaaagacaggcataagaaattataaaagtattatttgggaactgatatatgtccatattaaaatgaaatcttcgcaatttatgtttctctgctgcagctccagccggtccctccgttcagggtccgtgacttcccgcaacagaactcatttgtattttctcaaacataccatcctggtttgttctttcattgtttcagtcatcaacaagtatttattgggcacctgtgaggtgcgaagactggtgttagaaaaacaatgacgaataggggaaaatgagaagctggcacggttcctttctcatagaatttttatttattcattctttgtttcagtcatcaacaagtatttattgggcacctatgaggtgctaagtcaggtgctagaaaaacaatgatgaatgggggaaaatgagaagctgacatggttcctttctcatagaatttttattctactgaggaggataactgcatacgtgctatgaaggtaaggtagttggtgctctttgaggactagaatacaggaggatcgacctaatccagagctgagggagtcagggaaggcttccctcagaagtgatgattgagctgtgatttgaagtgagcaaagaaattcactagatgatgggtatgtggaggtggccaagaaaattctaagcttatgcagaggccatggggtgtttctgcagctgatgatgtggagctgagtcagcttcctccctttgcctggagagtccccactccctacctctagcctcctcatccaggggtccttgcatggggctagtgctgtcatctaaccctccctttctcaaccatcaggggtgggtttagaagtttgtggagctgttttattttgctttgttttgtgacattgaccagagggcattactgcatttattgagagagagccagagatgctcaacattctgcagtgtgcagggatagctctaaacaaaaaagaattgttccatccagcatgccagtagggcccctgttgagaatctacttggatgttcttaaaaccttgggttaagggtttctataggatattcttaaaaccttggcttggctgggtgtggtggctcacgcctgtaatcccagcactttgggaggccgaggcgggtggatcacaaggtcaggagttcgagaccaacctgaccaacatagtgaaaccttgtctctactaaaaatacaaaaattagccaggcatggtggcgggtgcctgtaatcccagctactcaggaggctaaggcaggagaatcgcttgaacccgggaggcagaggttgcagtgaagccgaaattgagccacctccctccagcctgggtgacagagcaagactctgtctcaagactccgtctcaaaaaacaaaaaataaaaagcaaacaaacaaaaaaaccccaccttggcttaagggtttctataggaaacactgttgcctcatcagtctaatttagatatccctcctcctataacattctgtacaaacgccaggctatactgtatttgttttacctccaaattgctatactccgattcctcttctgttttgttgtctgttttggcttcaaaattgttagctctttaaaggtggggaccatagttttttttttttttgccattgaaccctgaaatgtagcacagggacaagtatgtaacataactgtttattgaagaaataactaatggaagccccaatttcatttcttttcttttcttttttttttttgagacagagtcttgctgtgtcacccaggctggagtgcagtagtgctatctcagctgactgcaacctgcgcctcccgggttcaagcaattctcaagcttcagccttccgagtagctgggattacaggcgcctgccaccatgcccggccctttttttgtatttttagtagagacgggatttcgccatgttggccgggcatgttattggtaaacaatatgatattagtcctgctttttgagtgtctcctatgggccagatgtatgcattttctagttgaatcttcacactaattctgcacagtaggtggtatccccatctaacagaagaggaaacagactcggagaagttgaatgacttgtccaaggtggtgtggctagaaagtagcagagacaggatttgaactcaggtctctctggctcatgaacctatgccctttccagtctagcagaccatctgccttgtccagttgttttcttgaacttagatttagggccctagatttacctctatgaaatttcaaatcttgttaaaataggcctgccattccagatggttggaatctttttttatcctgaattttagtcacttgtattgcctgtttcttcttttgtcatgaaattgataagcaaatctatatcattatccaagttattggtaaaatatggtaataagaatactttattgaatatgtttatttgcctattccccctgctcttagccccagcacagggttcagtgcacatgaaatacttagtaaatgttgataaatattcattcatgtggataaataaaataaattggacaggcccagagactaagccaaagacgtactgctattagctcctttctaattaacattaattaattcagtaaccaagatcctttgaataagattattttaccagttcttaatccctctaattatgtcaggatccaattcctgtatcttcaccttgtctaccgggatttctagagcagccttgtgagagacatttctgagacctgtatgtcctgcgtctatgattcttccctgatcaaggtaggaatgcagttactctgtcatgactttttcttagagaaaccatattggcctcttgtgattacttagggctgcctcatacagttatgcaggctgtgcactgcacaagaggccacatcaaagggggttccatttatatcataggtatcatgggtgcatttttgtaatgacagtggcagagaaggctaccatgtcttgagctaatctaatcagtatattacaacatttctctaactaaaggaagtaaaatcttgaagcagaggtgtaattttctgattgtacaaaggtgctaagtggactagagtggcccatatgggcctttcctgggagcaaaacttctgtccagtggtctttagaacccatctttattcttatctttgaaaaatcaggccgggtgtggtggctcacgcctataatcccagtactttgggaggctgaggcaggtggatcacctgaggtcaggagttcgaaaccagcctggccaatatagtgaaaccctatctctactaaaaatacaaaaaattacctgggcgtagtggcgggcgcccataatcccagctacttgggaggctgaggcaggagaattgcttgaacgtgggaggcagaggttgcagtgagccgagatcgtgccattgcactctaacctgggcaacaagagcgaaactccatctcaaaaaaaaaaaaaaaaagagaaaagaaacaaagaaaaatcaaacattttgaaaatcggaaatcaggcctttgcttggcccagttttaaagtacttctcccgtttctcaggattctttaaacataccagaaatgaaaaccacagagatgtaattatttagaagcaagccttcataactcagccagcttttaggaaaccatcatagattttagttgttggttggcatagggctccacagtgatttagacaaatccaggtgggtgtctctcagatgaacagagaaatgggcaacactgttgatcagtggaggtaacaaaaggactcagaaggaggcacactgccctccatcttcctggcattattgcttcctctctcctctttcccacattttctcagctgtcactgtccctcccatgtaggcttctcaaaccccataatgctggtatccagtgcatccgttctcaaaaactgaagctgatggacaccagattgcatgtgaaggtgaaggatattatagcagaaggaaaccaaaataaaagaaaaacagctcctggaagtaaccaatgagaaggacagataagagtttgaagactgtggatgtgactgcttgttccctggttgacacactgaagaagaaatcatgttgattcagagttggcttggaggtgaggaggacaactcacccatcatagcaattttcctaactgccagtgtgatcagctgttaccacagaaatcacctgaaagcacagtcacaaaccaatttggctgacttgatgatttgatgtcttgtggagatgttagttttgctcagggacatcttgactctaatgcaacttttaaaaggaagtgaggtttctgtacccagctggtttccctgtaggagtcctgagttctcatcttccggtagagcctactctttcttctaagtttagaactttttcccttcttttggaagagaaggctttaaacctccctctttaacagccttgcagattgtttctgaaactcatgaggttgcagaagcatcatttgtctataaaatgtgcattggctccatatgccaaagcagccccctcccgactcctggtgatctctacctcctttttacacatcagcagctaagaacatatgctgtttgtcagcgggacttggtcatgtggtttggtgcttattttaatgactgccagagcttgcagccctgcagctgggaaaatgagaatagaagcctgctctgtgtgctccattttggcccagagaaggcacttcagggccaaattgcagttattctggcacttctgctaagtgaatggccccacatgggctcagagaaatcggacactgagtgctcgctgccctttagaacttgttcttttggacttctcgatgacctgtagtgggagactgaccatttccttttaattaagcctctgttgtgcttgcagagctcttttgagggaggtaggctttaaatgaggcatgttttaggcagaggaaattttcatagtgagcatggggaaggggaaccacattagtcaggcattgttggctaatatggggcagtgacaagaaaaactaccagcagctaccatttattgactgcttgctgtatgccaggcactgtagcaagcacctcacaaacatttagccctcccagcaagttctagagtagttatacctgtccttatcttacacctgagtaaatccaggtgcaggggggtgaaggaacctgccctaacctgccctaggcttctcagccaataggaggtggaggtggaatccacactcgggttcatctgtataaagacctgattcctgactgcattacattacctctccttttagcatcctttccctgaaccattaaaaactctcctgcttgtggtggacatggtggctcacgcctagtaatcctagcactttgggaggccaaggcaggtggatcacctggggtcaggagtttgagaccagcctggccaacaaagcaaaaccctactaaaaatacaaatattagctgggcatggtggcgcatgcctgtaatcccagctatgtgggaggccaaggcaggagaatcgcttgaacccggtagacggaggttgcagtgagccgagatcacgccattgcactccagcctggacgacagaacgagactctgtctcaaagaaaaacaaaccaaaaaaactcccctgctctcctaaagcaaacagacaaaaaactaaaacacacagaaaaatcagagtgtgataatttttagcattgtcaggctggtttatggaaactagaggcctgtgtgtctagcttcccctaaagacaggttctttttgtttttgtttttttctctccctctgttttttattttctacaattacttcttcactttaaagtgaattacttcttcatttaaaaaatcctgtatttcttcattaaaaaatatcctacacttcttcattttaaaaaatcctatactggcttgattatttgctgtgtccaatcctagagggagaatggttgggcggtctcactccaggaagcactcctgcttcaattaattctataagcagccaagccaaaataattccatccttagcttctttagtcacaaaatgccagaaaactttatggaaatgatttctcatttaggctacttatttagagtaatgaattgctttttaccaaagctaaatttaagtaggtcatctgttaactgttggatgaataaatgaaggttctcttcgtaggactggtatggtttaaagataggggttttgttctacttttttattttattttattttttgagacggggtcttgctctgttgcccaggctggaatacagtggtgcagtcatggctcactgcagcttggattgcctgggctcaggcgatcctcctgtctcagcctcctgagtagtcgggaccacaggcgtgcaccaccactccataataattttttaaaattatttgtggagatgatatcttactatgttgcctagagtggtcttgtctgggctcaagtgatcatcctgctttggcctcccaaagtgctaggattacaagtgtgagccactgtgcctggcctttttttttttttttgagacggagtcttgctctgtcgcccaggctggagtgcaggtgcgcaatcttggctcactgcaagctccgcctcccgggttcacgccattctcctgcctcagcctcccaagtagttgggactataggcgcccgccaccatgcccagctaattttttttttgtattttcagtagagacggggtttcaccgtgttagccaggatggtcttgatctcctgacctcatgatttgcccacctcggcctcccagagtgctaggattacaggtgtgagccaccttttttttttttttttttttaaaagcccggccttttttttttttttaaattccttcctgtgacagattctcaccctgtcacgcaggctggagttcagtggcacaatcacggctcactgcagactcgacctcctgggttcaagtgatcctcccacctcccacctcagcctcccaagtagctgggactacaggtgcctggcaatttttttttattttttgtagagatgggggcccaccgtgttgcccaggctggtcttgaactcctgggctcaagcagtcctccttcagcctcccaaagtgtggggattacaggtgtgagccactgcacccagccctattttacttctttattcatggataacatacataaagtgcactgatagcaaatgtttagcttgtggctttttacataggtatatgccttgtaaccaccacccagctcaagatacagaatatttccatctccccaggagccttcctcgtggccttctcaagtcagtagctccacctcaccctgtaatcaccattctaacttctgtcaggttgattggttttgcctgttgaacaacgtataaagctgtgtgtgacacacagcttttatcttaatagtaagataaaattattcttactattttattttggaacagtttcaaacttacagaaattctacaagaataagacagataccttctatttatccatctcccagagactcccattcagtttttgtcccaataatgtccttttatagtggagcatcatcccaggatcacacgtggtccccagctgtcacgtctttgtggtctctttcagtctgggacagctccttgtctccctttgacttttaagaccatggcacttctgaagactataatcctggtcattttgtagaatgtttttcaacttgggtttatctgatgtttcctcccatgagatccaggttgtgtattttcatccaaacaccacagatgctgtgttctttccatggcattctatcagatagcacacagtgtctgtttgtcacgttgctgctggtgttaactttaatctcttcattaaaatgctatattaatgaccagatattgtcactagtagctaccagaatgctttcagaaagaaacatttattcttgactactttcatatgcagttgcataaggttttatttgcactgatttgtgcatgcatgtttcctgcccgctaaggtcttagtcctgaaaaaacaataataggtttagggacctaagttatatggcatatcgtcgtatgttcttcatgattccttactccatattctgtggtaattggcttctggggtttgttctcatagtcatagaagtttgggttatttcttgcttttgtttcttttcgggaggatatctatagaaagttccttgtttttgttttgtgtttttttttttgtcttttcttttctttctttctttctttttttttttttttttttttttttgagacagggtctggctcgatcacctgggctggagtgcagtggtgccatcttgccaccttggcttactgcagccttaatctcccaggcttaagcgatcctccacctgagtctcccaagtagctgggaacacaggcgcatgccaccgccatgcccagctaactttttaaatatttttggtagagacggaatgttgcccatgttgcccaggctggtctcaaactcctgagctcaagctatcctcccgcctcagacccccaaagtgctgggattgcaggtgtgagccaccgcacccaacctttttttattattattattattttatttttaaattaattttttctagaaatggtgttctgctatgttgcccaggctggtcatgaactcctgcccccaagcagtcctcctgcctcagccttccgaagtgctgggatgcaggtgtgagccactgtgcctggctgataaaaggtttctaaaattcatcctagtaatgtttgagagccactcacaagggattagggacattgaaaggaatatgagccaggatctgtatttgtagagtttacaatcaagtttggtggaggcaaacaggtaagcaaagagttgaaaaacaataccaaatgtctaggtggcttagagccaggagtgattaaatatagctgccaggggaggagtatgaggggagtgaagacaggcgaggcacctctgagaaggctttcctgagcaggtcacctctgagctgctctgtgaatgccaggcagtcacagaagcaaggtgagggagaacagggaacacttttcagacagaggggctgtgagttctaggccatgggggcctgagagcggctgctaaggagcatcaagtcagaggtgaggagtgacagggccgtggggtagaactagaaaagtcggaaggcagcagcggcggtctgggagaaagcataaggaaaccatcagaggtgtagtcatatgcctgcttaagatgtagaatgctgctgatgcagtctttccggaacgttatgagccttaataaatatcaaatgagcttcgtcttggcttaatgatgctgagagatgtgtgaatgttttgagtagactgtatttaccagttcataaagaagtatttgcagcattacaaggtgcctattgcaggccagcagatgtggccttagaatctggccttcgccctcagcgccctcactgatctttactgccctttaaaaagattatgccaaaaatatcagtcttcctcaaaacaaaatatactattggcaccttcaaagaatcaaaagataacaggtttggaagatcatttagtccaggagtcagcaaactatagcctgtggatcaagtcctgcccgaggcctttttttgtgcagtccaggagctaagaatggtttttgcatttttttaagggttgtaaaaaaaataaaatacacagcagactgtttgaggcctgcagtgccttaaaatatttactatctggccttcttcaggaaaagcttgccagaccctggtcttgtctgactgcctgatacagcaatcctttgtgcagtattacgtggcaaataatcatccaatatatgcttgaacacttctgctaatggagaactcattatctctctgatctatttcctgtttggacaattcaagctattagtaatttttaaactgctgaaatttatcttactatatagcatccatccattggccctttgtgcgaaaagagagctattatttcatttcaacctttactgagctcttaatatgatccaggcactgtgctcagtcctgaagaaagatgagtaagacatggtgcttgtttcaaggatctcccagctatgatttcttggaaccaaagcagttgagctgctagtcttttatctctctctttgtcttcttgccattgggttaggacttttttctttaattattttagttatttctgtattgttttatatacataatacaaactttaagaggcaaaaaaggtcatgcagtgaaaataagtctccccacactcctctctcctcacctcctagcagctttcttgggaggcaaccgccactgcacatttcctgtggggatttgatcttaaaaaacaaaagatttagatccatgtggacagaaacttttggtaagtactcattcagtgacattttctgagctcctacttgtgctgagtgtgactgagttttattttcattaaagtctgaaatttgcaccaagtttgggtggtagacacagccccgggggattgtattggttaaccacacacgctgctatttcagtttaatcttgactgaacttcttggctactgcaggctttcttacaccactagagttcttgctcattacagtgttgaatccctatcaaaacctttcctgtttaattggcagtgacacaatcccatcttgtgtaactcaggatgtttcacatcctgaaatagtttgaaataaaattgaaacacacttacattgatgcctatgttaatttctttccttgactgtgtctgaatataatgttgaagtgtgatagaaacaatcctttatctttctaagctaagcagaggccgaagtttcacttgcactgtccagggttatacaggcaagccttactttttcaggaagtaggtaatgtttggatttagattagtgacacatgaataactctgtctatgactcacttccccccaaattcccctccgaccattacttcttaaatcttcccttccagcttaagcgctgtagtgatgttacatagacgtgtatgttcctaagtgatacctttaccatagattgtcctgtttaggtatttccagaagattcctcatcatgctgatgttgcttaagacttttctgttttcagcctgtcatggaacggtttcagcagctcaacatcaactatatcctcttatgaaataggcccttggattctgttcagaatttccctaaggccaaataagtcagaaaatatttgaaggatgtgcctcttatgcaaattacttttgtgcaatcatggatcactgcagcctcaacctcctggtgggctcgagctatcttcctacctcagcttcccgagttgttgggactaccgatgcgccctgcaatgcccggcaaattttaaaactttttttgtagaaatggggtctcaccatgttgcccaggctcgtctcaaactcctgggctcaagcgatcctcctgcctcagcctcccaaagagttaggattatgggcatggaccactgcactgggccttttttttctctctctgtaaaagtagtttatttgttctgtttacaaagtacagggaaggaataagggcaatacctggaacccctttggtcgcacatcttcccagtctatgcttctataaataacgtttgtacaacagcaaactcatattgtccccatgtgttttctcacatcctggtagctgcagtctatagtatagaccgggtaggaaatagatgcctgattcacagggtagggctcccctccaattagtgttccagctcacttttgctaatattgaaacagaagtaactagttgttcttaaaaactctctcatgaacaagtaggtcataagcaaattatgtctgcacaactcctagaattgtttcaaataactttatagaaaggcagtgactaaggccctttcctctttcccatctttctaagtcctaggctgccttcattcagcacctggactgccgcctgggtcccccacatcccagcgcggtgatggaggaggggcaggccaggccaagcatgaggaataagctgtctttactgggctcagaccaggagcccatggtcttgaggaactctgtatttatcagttttcttctccacgttctcttccacctgtttctgcagcctcatggcctgtttttacttttggtagtggatcttggccttctccttcctcttctcctccaggtagctgtcactgcctggtacttccagccaacctcatgaaccagccacccccaggtaggcagactttattttaggcttcagacgcacaaccttgaaggcaccaggaaccactatctgcaattaatatacaaaatgtctgttatcttctttttttttgagatagagtttcacccttgtcgcccaggctggagtgcaatggtgcgatctcagctcactgcaacctctgcctcccgggttcaagcagttctcctgcctcagcctcctgagtagctgggattataggcatgcaccaccatgcccggctaatttttgtatttttagtggagacggggtttcgccatgttggtcaggctggtcttgacctccttaccaagtgatccacccacctcagcctccaaagtgctgggattacaggcgtgagtcacttcacccggccatgtctgttatcttttaagtagtcatccttagtcgcttttacccagctaccgaagtgctgtagaatagagttttcttttttgtctttgtgattctctggcactggtaaaattccatcttgatgtccttagcaggtcatcaaaattatgatgaaaacaagttacatttgtccttgaagagaaagttgtggatgactgacatatgtagggacttgatgatctgtcacacagaggattttagatgaaatccttttgtaccactgtctgcaactgtgttgatttccttccacattggatgatagctctggccagggcctttttgttttgactgttggagaggaggttagcttgtgaataattggttattttttagcatgtgtgaggctgatgggcagtagaaagttcctgaaaagaagtttcttccttcaaggcagtgtaatatagtgacgagaacaggggctttgaagctagcagacccgggttatcatctcagctctaccacttcctgtgtgactctgggcaagttacttaagctcccagtgtctcagttttctcttcagtaaagtaggcataatcttaccactggggttgtcaagggaataacatgtaaactgtttagtgtagtgcttggtacagaatgagcatttaataagaacagttactaatatgacattactactgctgttatttaaatagtttttaacagtattatcaaaacagcaagcacagttcatggtggtaaatgccctaatggaagtgttcatctgtcaccattgagaagggaactgttaatatccactgactgttactgacagcttcataaggaccttgtgagatgagaagtacttttcctggtagagaggggaaaggtttcctaggaacatcagccatgcagaagatcaggaaactagcaggctaaggctgcagcaccttattctctgtgtagtaaggccagtaagctttcgtttgtttgtttaaacaagggagccacctgtgcagatcattcctggtggcagtttgtcaccttgtttggaggagatgggccaaaggcagtgacccgtgagtatatcactgcaagagccgaggtgtgagatgatggagcctggcacgtagcagtgggaatggagagaaggcaggcagacctagacaggaagcatgaagttgcatgaggagcatgggcttcagagtggcgtgaatctggaagctgaatcctggttcccctactttcctagctgtatagccttgtgtgaatttatttttttctttctttctttcttttttttttttttttggagacagagtctcgctctgttgcccaggctggagtgcagtggcacgatctccatcttggctcactgcaacctccgcctcctgggttcaaacaattctcctgcgtcagcctcccaaatagctgggattacaggcgtgcaccaccacacctgggtaatttttgtatttttagtagagatggggtttcaccatgtttgtcaggctggtctcgagctcttgacctcaggtgatctgcccgccttggcctcccaaagtgctaggattacaggcgtgagccaccacacccagcctccttgtgtgaatttcttacttcttggaacctcagtttcttcctctataaaattggagctattccttagggcttctgagagaattgaattcccaccacacccagcctccttgtgtgaatttcttacttcttggaacctcagtttcttcctctataaaattggagctattccttagggcttctgagagaattgaattcacaccacacccagcctccttgtgtgaatttcttacttcttggaacctcagtttcttcctctataaaattggagctattccttagggcttctgagagaattgaattcaattgaacaacccttgctgctgtgcctagttttggtctgtgttcagtaactgttaaccttcatctcattccagaggactgtttaaggttgagcttctaggaattagtgctttattgcgttgagagagagaaaaattgaagatgactttgaaatttcttccttgaattaaggtgatactattaagcaaactaggaaatacagagaaaggggcagaatttagggaaaatatatgttgaattttggatttgttgaatttgagattctgaggaatctaagtcctggctttaaaggacacttaaatatatgtttagaggttagagctagaagtacagtcctgagattcattggcatacagacagaacttgttgtagaaagtgaatgatttggccgggtgtggtggctcacgcctgtaatcccagcactttaggaggccaaggcgagcagattgcttgaggtcaggagtttgagaccagcctgtctaacatggtgaaaccccatctctcccaaaaatataaaaaattagccgggtgcggtggtgcatgcctgtaatcccagctactcaagaggctgaggcaggagaatcacttgaacccgggaggtgaaagttgaagtgagccgagatcgtgccactacactccagcctggatgacagaatgagactctgtctcaaaaaaaaaaaaaaaaagaaagaaagtgaatgactggccgggcggggtggctcacatctgtaatcccagcactttggtacatcaaggcaggcggatcacttgaggtcaggagtttgagactagcctgaccaatgtagcgaaacctgtctctactaaaaaatacaaaacattagggccaggcatggtggctcacgcctgtaatcccagctacttgggagtctgaggcaggagaatcacgtgaacccaggaggcagaggtttcagtgagccgagatcatgccactgcactccagcctgggcaacagagcaagactccgtatcgagagaaaaaaaaaaacattagccgggcatggtgacacacacctgtagtcccagctacttgggaggctgaggcaggagaatcgcttgaacctgggaggccgaggttgctgtgagctgaaattgcaccattgcactccagcctgggcgacagagcaggactccgtctcaaaaaaaaaaaaaaaaagaaaaagaaagaaagaaaatgaatgactgaggagagggctgagcatggaagccttcaaaaaccaacagtagaagaaaacgctagctgcattgtagaggaaaagagggaaagggagagattagaggcccaggaaacaacaggaggctgtgagagtgtttctacacgtgtgcctcaaatcctcaaatcacctgttttctttttattttattttatttttttttgaaatggagttttgctcttgttgcccaggctggagtgcaactgcaacctccgcctcccaggttcaagagattctcgtgcctcagcctcccaagtagctgggattacaggtgcactccactacacccggctaatttttttttatttttagtagagatgggggtttcaccatattggctaggctggtcctgaactcctaacctcaggcgatcccccgctttggcctcccaaagtactaggattacaggcgtgagccactgagcctggccaaatcacctgttttccattgggcaaaattataaaaattctttcaaacaattaaaagccaaaaaatatttaataggagttgagggtgcattcaaatacatttgaggtgattttgaggtggggcctccaaaaataagtgccagtgacctaggcttcaaaatagcaccaaacctacagcagcatcacctgaggcactaggcaaactccagactcctggcctccatcactatcccttctcttatcgaatcttctttcctccacaggaagtgggagtgagacccaggcatcctcattttttaataagtgctcaaaggccgggagcagtggctcacacttgtaatctcagcactttaggaggcctgggtgggcagatcacatggtcaggagttcgagaccagcctggccaacatagtgaaaccacatctctcctaaaaaacaaaaattagccgggcatggtggtgcacacctgtagtcccagctactcaggaggcttaggcaggagaattgcttgaaccaaggaggtggaggttgcagtgagccgagactgtggcactgcactccagcctcggcaacagagcaagactctgtctcagagaaaaaaataaataaatatgtgctcaagatggtgaatgttggaaaacgcttggtcaggcgctatctggggatgtgatgctgcaagccacactgaggcagtggggaattttagggacagtgatgtgttgtcttttgtgatcaatgaagcttatcaattatatagaaaaataattattataattcccacctcattccttctgtttgcttttcagtttttttaagaccttgttgtgagtctttcattcattcaaaattggatttctgttgccaaaacatctttttaaatgtggaaagcatattcagcctgttgaaaaacaacaacaaaccacccattaggaatccagtggcagactaacctgccccactggaacttgctacggacacagtcagttactcccctctggtgattctgccttttatagcctgttctcttttaagcaatctacaatgaaattgcattttagaaagccaccaccgcactccttttaaacattaaatacaatgtttaaatgaccagtcattttctttgattcctagtgtccattcatcattactcttctcaaagtttttttactgcttagagttggtagatatatgtactgtcctggtgttccaactacagctttctttgttttactggttctatttctttctttcttttctttctttctttctttttttttttttttgagatggagtttcgctcttgttgcccaggctggagtgcaatggcacaatctcggttcactgcaacctctgtctcctgcagttctcctgcctcagcctcccaagtagctgggattacaggcatgtgccaccacacccagctaattttgtatttttggtagagacggggtttcaccattttggtcaggctggtctcaaactcctgacctcaggtgatccacccgccttggcctcccaaagtgctgggattacaggcatgagccaccgcgcctggcctactggttctatttctttttactccctaactgcggacattctctaggactttgtggggctttttctttctctgagtaacttctaagaactgatcattgtcacctgtgttagctgttctctcagtatccatgtccagttttcttggcttatctttgccctgctgttgtccacagctgaaaatgtctttcattattactcttctgaaacttgctttgcctctcaagggtcttctctttcactcaagctgccattctcctagccatttgtggcttgacaccccaagagctttattctctcttttcattgcttgagtccaccaagataccaagttaggtcaccttttattttaaatcagccccaacgagggtcccctccttttcacttttactcctctgctctaatccaggtcttcataaatttttgggcttttagctgatttccctgcctgcctctttcaaagccctttacccactgcggaatcatatttaccatgcaggactgccactggcttcctcctccaaaattcgttagcctcacatttgaggcttctccataggtgttcacccatgtcacctgctcagctctgtgtgtgctgctcctgcacagcacaaaccctccacatgaggacagctggtttcacgtgtccctatttctgccatgagtattcctctgctcttcttgttccttctgccctccacccatcttcccccaccccttacccatccttttcaacatcactcagtgcccatctgcttcacggtgtctttcccagggctctgccccacattcatcccattcttcttgatttgaataccttttatgtaggagcactaactttgtatttcattatacagtttctatcaatccaaagctccttatctctaattctaaatccaacaagtttggaaaactgaaagctttttaatagtcttggcacaaaactcaagcaaaacctccctgagtagatatgagctgtttttaaaaaatatatcccatttggccaggtgcagtggctcatgcctgtaatcgcagcactttgggagaccagggtggaaggatcacaaatccaagagctcgagaccagcctgggtgacatgacaagacctggtttctactgaaaatacagaaaaattagccagtcacggtagcccatgcctgtagtctcagccactcgggaggctgaggtgggaggattgtttgagcttgggaggctgaggttgcagtgagctgagattgtgccactgtactgtagcctgggcagcagagcgtgaccctgtaaatgtatcccatttacagtgactgttcatatgttctgctgcagaaatacttgtatgtctggttgtggggtaattggacagaatggaaagtgaagggaccttatcaatttgctttttggagctgccagatttctttagtattgtccttctcaaactggggtatgttaccccggagagtatggagggattatagaaagttacagtatacgtatgcatgattgccaggaaggtcaaatttattagatgattcgaagggggaaatgaaataataaaatatatatcatggcacaaaatacaaaatttccatgcattgaaaagataaaatatgagatttcaaagaaatttaggcactgtgggaggtggggagaagcatatcctcattatctgcttcagctagaggtgttaaagcactgctctcagacagaattctgacagtttgggttgttgcatttctgagtggctggatttaggattttgtacttgcagagttctccaggaccacacaagatggcaaaaatttctgagacagtgtctgtgtcgaagaaggaataacagtagtgcatcagtcagactgactcaaggaaggaagaagcataaacattaaggccgcaaaggttacttagaaaaatcactgtgtcatcggtgaaaccctgtctctaccaaaaatacaaaaaattagctgggcgtggtggcatgcgcctgtagtcccagctacttgggaggctgaggcaggagaattgcttgaacccgggaggcggaggttgtagtgagccgagattgcaccactgcactccagtgcaacagagtgagactccatctcaattaaaaaaaaaaaaaatcactgtgtcatgaggagaatcagcttgacaacacaggccaattaggatggttttcaaagttgtgtcttaagtgaaataagccagtcacaaaaacacaaatactgtatgatgccatttacatgaagtagtcaaacctgtatagacagaaagtagaatggtgggtgcaaggtcctgggggtaaggaaatggggagttattgtttaaagagtatagagttccagttttgcaagatgaaaaagttctggagatctgtttcacaacgttgtgattatacttaatatcacctaactgtttacctcaaaataatcaagatggtaaagtatatgttatgtgtttcttaccacaatccaaaaagaagttgtgtttcaaggtagcctgtaaacatctcattactttttgtttgtttgaattaaactttattacaaatgttctttctcaccaggttttgcatggatatgttattttgctgtgttctgttttgttttttaataggcaagaaataatggcggcagctacgggggatcctggactctctaaactgcagtttgccccttttagtagtgccttggatgttgggttttggcatgagttgacccagaagaagctgaacgagtatcggctggatgaagctcccaaggacattaagggttattactacaatggtaggtgattgtaaatttcattttccatcatcttctgttatcctcacggtcctccagtatagtgtcagctttcctttagaaagagacagccttgtcttttataatcagtgctcttcactagtttctattttacttcctgactttttgatcccagttcattttcatttattttctcttgttgtggggaaaaagaaagagagtagtgaaactcaaattattaatccaaataatacccattacttagcattgctgtgggaagagattggaaatattttttccattgaatcttttttatattcttggcgaatgtctcatattcacaagagctctgtcacattctgccatttatctatccatacatatattatctatgtagcatagataatcagaaattggatggggcgccttgggctcaacaaagagaagaaaactattcataagcatttttgttatgaacgctgctatttctgacttgtcattgaaaatgtgataatgcttctgtccaggtgactctgctgggctgccagctcgcttaacattggagttcagtgcttttgacatgtgagtatttatttgttcaaaatctgaagtaaagaatactacttttggcaaggaataagcatgcttgcctccctcataggtggaccacaggaggactagggaagttcccggtgggcagagtcagcccccctcatgattctcttatacctcccatagagatgagtgctggatacttaggtctgcctggttaatttttcaccacctatttatcagagtcaattaggtgccaggtgccatctagattgattgagacatagataatatccctcttgattttgattgtagttaatattttgtgttcttttcttgatacctctcttgattcactcctttagtccatgggcattgtccatgggcattgatcaatgaatgtttattagtctacttctgtatacaagccactgtgcaaggcattatagtgctatataaaggaatatgatagatatatccttgaagaatttttttaaatctgcttgggagctgtggggagttgctggagagaagagacacacttttttttttttttgagacaggatctcactctgtcacccaggctggagtgtagtagtacaatctcagcccactgcaacctcttcctcctgagttcaagcttttctcgtgccttagcctcccaagtagctgggactacaagctcacgccatcatgcctggctaatttttgtatttttttggtagagacagtgtttcaccatatttgccaggcagatcttgaactcctgacttcaagtgattcgcctgccttggcctcccaaagtgctgctgggattacacgatcgagccaccacacccagccaagagacacatttattgagcacttaattaggcattttcataaacatctgttctttgagactcgccaggtgtgatttttctctcttttttcagatgaggaaagcatgggatgaaaggtaaaaatggcttgcccagggtcacacctggccaaatttagaaagcaggggtgagagaaaaaaatgtatttataaatgtatttctgaaacacagtatgagtagctacagggattttgctatcttctacagaaatagagaaaccaggagggggatacaaatttaggaggagacaagtttggtttagaatatgttgagtttgagatgacagtgtctgctagaaatgtccaggaggaactggagacggggagaaaggatcagactagatttgggagacatccaggtagaggagaaagagaataaagatagtctccaacttatggtggtttaatgactttttgactttacgatggtgagaaagcgatacacattcagtggaaattatactttgtggacccatacagccattcggtttttcactttcagtacagtattcaataaattacctgagatattcaacactttattatggaacaggctttgtgttaagatgattttgcccaactctaggctaatgtaagtgttctgggcacgtttaagggaggctagactaagctatgtctggcaggttagacgtattaaatagagttttgatttatgatatttttttcaatttatgatgagtttatcaggacatggtaagttgaggagcatctgtatagtataagaacaaaaggcgcaaacagtgaatggctctaattagggaggtgaaagatgatacagaactagcgaaggacacaggggttgtcagaggaaaaccagaaaagtgttagagaaaccaaagaaggcaatgctttctggagggaaagagaaactaacagtgtcagaagcacagaggtcaatgcgagggccactgtgtttgttgattaagtcattgtggtccttaagaattcagtttgagaaagagggtggagctgaaaccaagatgagggcctttaagattattgagaattgaaaaaggctacagtgttttttctgctttattgtacctcagcagtatcaagatggggaattttaggaaggtgaagaagtcttataggtctttctggcttttgaaagtggcaatggtcaactattaggatatttaaaataaagtgtccctagaattttttttaatctcagaaaatcaatactttttttccctttatctcaatccagttgcaaaatttgaaagcacgatgtacatccacaatgattttagtatttgtatctttaaaaatgtatgtgttggtgtttcttgttccctttggagctttcttgctccatcgtaaactgcttgtggttacctgtcaaaagaaataaaatcctaataatctctctcttgttttggcaaactaacttattttggagccagtaagatatgacgaggaaactactggaaatgtacaagcattaaattgtctgaagatggtacgggggagcatcaacagtctgttttgtgtaatctggagagcctcatatttatctcagactaacctcactcctatccttatccttctactggactgtttgttttataaggttttaataattttattctttagaataattaattagaaaaatgcagttcacagaagttaggtttgaacttactacaaaatgtgagcatcttaaacttaattaatctaaaaattttggttgaaggagataagaaaatctgtgatcctgcagctatgactttcacacaaattgctcattttcactcatcatattttttctttaaccgttgaataccctcagtgtgcaaggcactgtggtagacagtgggatgtgaacagaaataagatgtggtccccattgtgtgaaaatagccctggattcgaagtttgaagatttggaatctatggctaattaactgtgctacttcaataagctcttttagttttctcagcttttgtttcctcatctttaaaatgggttcttgctttctaatgttctttccagttttaaaagtctgtcactttctgagtccctattaggatggctgagaagtttaatgaaagtgcttgggacttctcagaaggcctgatttctttattccaaattatttcctttattattaccccatttttgttttgattgctgtatatctgcatgggttggtagagaaagtctttatgaatttatttatcaaagaaggaatatctacaatgtgcagatgtgtgtgtgttaggaatacaaagacttatgaaatatgttctccagagctcctctactgtatgagagagagaagtagaaggcaaatatttgcattatagtgtgctcagtgctgtaataagcatggagaggtaatcattatttcaggaaaacttattgattgcttcctctgtgtcttgataacagaatgtgctaggtgctgggcatacagacaggaatgacatacagttgaatagctaacaatcccagtactcacttatagatgtcaagagtatctcagctttgcatagcactggataagtctcttctactctgtgcccctgatagtcttatggatctctaaggatcctgttctctgaattgtattagatgaattgtcagtcaagtagtattttatcaggcaccaactgtcttaaactggaatatgctgtcttgagttagggtatcctgctggatcagacccaaaaatgtaagggcccaaacactaagaagttcatttcttgctcatcaaatagcccagggctgctggtccagtcttcttccatgttgtggctccattatccctgaggactttgcattgtgtgctgattaagacagttgtcactttcaggtaacaacagattaatgaggaaagacagccaaggtgcaaacaggtggaagagacacacttagtctcttaaaggccctggagggaagggacatttatcactccactcagattctactgaggagaactcgtggcctcacttgtcttgcaaagaagactgggaagcgtggaacccagctaaaacgttatgtgtgctttctgtttctgttgacaaggaggaaaatagattttgattgacaatctctatacctatgtgaagctgagaaaaaaaaagaattttccgccaggcgcggtggctcacgcctgtaatcccagcactttgggaggccgaggcaggcggatcacgaggtcaggagatcaagaccatcctggctaacatggtgaaaccccgtctctactaaaaacacaaaaaattagccgggcgtggtgccggcgcctgtagtcccagctgcttgagaggctgaggcaggagaatggtgtgaacccgggaggcggagcttgcagtgagccgagatcctgccactgcactccggcctgggcgacagagcgagactccgtctctaaaaaaaaaaaaagaattttcctttctctgggcctcaaatgatcaacatttgaatgaagaacatttctgtgggtttctttcccttgaggaatatttgtctttattcataagaaattttcttttcggccgggcgcggtggctcacgcctgtaatcccagcactttgggaggccgaggcgggtgggtcacgaggtcagggatcgagaccatcctggttaacacggtgaaaccccgtctctactaaaaatgcaaaaaaaaaaaaaaaaaaaaaaaattagccgggcgtggtggcgggcgcctgtagtcccagctactcgggaggctgaggcaggagaaaggcgtgaacctgggaggcggagcttgcagtgagccgagatcgcacgactgcactccagcctgggtgacagagtgagactccgtctcaaaaagaaaaaaatgtttttcttttctatgcctcaagttggacctaattagagaaatagaaggcataattcttgccctcaaagaactgaaaaggtagtgaaggaagtaggagtcttaggcacactcgtgtgtggggcagaggctgtgtctttcttattctctgctgtatcaccagcacccaacacagatctggggtgtactatttgctcaataactgcctaattgaattacaagcggtctaagcgcatggctgtcaaaatcacatgtggtgtggttgatggaaagacaccagtggactgtgttagaggatgttacaaacagaaactctgcgattgctagggaagtcaggagatgacaaagaagcatgacccccaacatgacccccaactgactgtgactttctgggttcccagcgttccctgtgggcatgtgaagctgtgtgcgaagtagattcctccaggtatgatgagcacaggtgctcttccagaggatttattccgttctgaccacctgcctgcctgttggccaagtgtaaataactggtgcaacacagccccagcactttcctgagtcatcgctgtgagactgaatgaagtgaaggccaagtgtctagctgtaatgtccccaaagcaggcccagtcttccggcctttgtgagatccatttttactaggttagtatacgcattatcgcaagttcactattggccttagtatgtggagaaaatttctaatttgaattctttttaggagctatgttgagatataattcatataccataaaattcaccccttagtttaaaggggtacgattcagtggtttttagtagattcatagagttgtgctgccattactattaattccagaacatttccatctcccaaaaaagacacccttagcaattactctccatcccccctcctccatactcaccagccctagccaaccataactctactttctgtctctgaggatttgcctattctgcatatttcatgtaagtggaaccataggaaactaaactaggaagtgtcagaaccaagatttgaactaaattctcttgtctccaagtctcaggctccttccctctcattatcactttttaaattcattttcctgccacctcccatggtggaactttagtcatgaaagatgcttctcctttgaagcttccgattgtcctggctaattaacttgcataagtgctgatgctcctaggagcctagccatcttgcagttgcttgagttcttggtatgcagttttctcctttcacaaaatgaggctttggtatggctctcacacacctgggaagtttgggaagaagggtaccttcctcttctgtgcttgtgtccaaattagatcatggcattcttccttctgtttccacatcctgtttcagcagtaatttcataaagccaagtctgaatgtagaaggcctagtttaccaactgctctgctttctttgccttccctctgggcttaatcttttccctttgtgatttctctctcttcaagaccagcttggatgtcctcatctcacctggatgaaaaatattcttttattggaggagcatggtgacaaacaacttgtgatttgctgactcatacctcccaagagaaggttctggccattgaaagctagctctccctgaggacttggcatttgagcctgacagacggcatttgacagagccatgtcattcattgcaccccttcatacctgttctaggtttagatttctactctttcagccccataaacccaattttacatggactttaaatgaaaagacataggttcttctaaactatgcagctgtcatcagtgcagtcagtgaaaaggcattctgtctgcattagctgcgacaacattagtaggctactaatgaaatgaatattttcatttaacatctgtaaactctgaaatgcaagttaatcatttcagagaagagaccagatttgtccacatctgaattcgtattcagaatcaactcctcttctcttctcctgactttgcttactctgaggactgtgaggcctttgggggcaatgtagagtgtgtaaacctggtggcacgacagattgacaggtagcccaggtgtgagacattttgtctgcagacaaccgtcaggggcttgcccagcagcagttttgtgcagagccctgtttggggtgggctaggttgtggggcagtcaggagaacacatactttctatcctcaaggagcttagtgtcctccagctgggtgggtatgactgtagttcttgaaaatgctagaaaatattatgctgagttttatgtgccaactcttagcagagaaagtggagatagctttccggaagaggagagattgattagagcaggaccttgaagcctgggagggtctgagaggtggcgtaggcacagcacagtaccttggactcagctagttctggttttagattcaagctctgcctattattatgtgaccttaggcaagttgcttaaacctttaaatgggggaaaagagctgttatgagaattcaaactgtgcacagctcaacaaacaatatttccctcaggttaaaggtgggaaagaagaacaaataggaaatgaacttctctttgggggacagtagaacagcatcctgataggttagagtatagggaatatataggcttttaggggggaatggtgcctgttttttagttcttgagttatgatattcatctttttccaagaaaacatacagttaatcttctgtttgccctgcagagcaataccctttttatcccactacagtggtggttgacttgtctctccctggctgagtcccagctgtgcctgactaaccgtgtttctcttgtatctaggagtgctcccaccccagcccgttgctgcccagctattggaacactgtataacaccaacacactcgagtctttcaagactgcagataagaagctccttttggaacaagcagcaaatgaggttagctgtgaaaacgtgatgtatgtgtcatatttcctgtggtcctggcaggtgcagtgtttgtgatcaggcacatgggtctgctgcagaaactggcatatgaagggaacttaaagacacttgtgggctttggtatatttctccagagagaatactcccagctgtctccttctgtattggcaggaaggtcagggagaggacatccaggctctcacctgggataggctggaaataacatggcagggcagaggttaagtaatcagtttgctgctcatctccagccagcattttgaagcagccagacctctgagagttgtgttcctgtggctgaatgcctctaggcactctgtttattgtgccttggagaggcttggcaatcctgtgcaccatggcggtagaggagattatcatgtagtctctgcagtgtcttcacttatctactgcatctgattttcaaggcctctgtggcctggccctgttttcctcttttcctttctgacctctttactcttgcccttgcattctctgagtctgtcatagcaaatcacatgtaattccttctacctactttctgttctgtcctctctccttgggaatacaatatcctctctgcctggaatgtctttcctttgcttctttacattggagttagtgagaggaattaaaatgggaggtgggggcagtttatcccaatcctgtctaaccgctgtaatcaaggagtctttataccagtctttatcacgacatgaatcttgttggtgtgggtgcagtggtcaggtcctgaggcaggcttccttcacatccctcgggatggacgcagctgtgactcaggagaggatggtcgtttttcttgacctgtggcttgactgctcctgggcctcctgctttggctgcacatttaaaagggagtctccaaagaattgggtcaggccttaatcatcttggaaaaaagcaggctctgcccccacaggaatatcccacccctcaactggggcccagaattctcctagcagcttctgccccatgccccctcggcttaccggaaactgggggcctctcttcagtggtccagcttctccaaggccagtatgtcagtagcaggaacttacttctgcttacttatttccctcttccacccacacttagggaatgattcttattagtgcaactgttttgtcttgcttagtaacaccaagtttagctacgaatcttatctacaaaaacatcttgtgatccacagctgctgaccagcaccagcatttgctcctagtctcagtacttgctgagtatacataaatttgaagtttgttcttctttcttcatctctcagggcaagataatctcaaataagacttcaagaaacccctatgtgtatttcacagcatttcctttgagagcccctcccaggctctttactctccccgttccccagcagagtctgcagaggattcctcccataaattctacctacttctgtgacagcaaatcctacatggtggtgaagttatacatttacgccagtctctctatctagactgcgagtgtcttgagggtagggactgactgtgtcttttatttctgtaaccctgatgtgcctggtatatagtagacaataagtaaatatttgctgaaggagattgtgaaggcatgaaaatggcctggttgccccctcggtgctgagatctgctgagaggaggcgcctgggttccctcacttggcttagatgttgaagggagtgtggctgggagagaggcagtgtgaagtcggcagagtgaggtaacaacccacttcattgtttggggtaagtggtgctgggcctgtaggaaagaagagcctggtgcttttcagctccacacttcacctgagagtgagaaactcagagatgcctggtaacctgccttgatgcttttcttcttcttgcagatatgggaatccataaaatcaggcactgctcttgaaaaccctgtactcctcaacaagttcctcctcttgacatttgcagtaagtaaatgggctctcggttgcaccgaggttggtgaaatcccctggcttagcccagtgtaccagtagaacagtctgctcttctctccgaagctactaccttctgttacttaaataatagctgttaacgaaacgctcatttgattagtggccagatagtgctggcacctattaccaatgctaacttaattcacccctatggatcatactggcagtaattgcatagtttatataacacagggcatgataaagtcaggttcagggaatgtggtttcattgttgctaacgcctttgttaaataccatcctaaataccatctaaataaaggaaaggtgcttctggattagaggagatcacactgcatagcttgaccacaaaatcgcttgttgattttttttttttgtttttttaaagacagaaacatgttttctgtaagcgaaatctaattaaaatgaacgttaagggcagccttgaaaaggaaatcgtattagggtaacatgtgctgcccagtgaagaaggggtaggatgtagatggaaggacctggccttggtgagggaaaagtagggaaaaggtaagggtcgattatagagataccagctatgcatgcatgcgcgtgtgtgcgtacacacacacacagataccagttatacacaggcacgtgcacacacacagcaacacacagatgtgtgtatatatatctgtgtatataaaactaatttatatcctttattattatattgactatataacattctgtcaaatgtatgtttcatagattcctgttatatatttaggtggtttctaatattcactgttataaaaaatgctagtctgggcacagtggctcatgcttgtaataccagcactttgggaggctgaggcaggtggatcacttgaggccaagagtttgagaccagcctgggcaacaccttgtcacttcaaaaaatataaaaattagctgggtgtggtggcgcctgcctgtggttccagctactggggagctgaggtgggaggatcatctgagcctgggagattgaggctgcagcatgccatgattgcaccactgcactccagcctggacaacagagtgagaccctgtctcaaaaaaaaaaaaatactgtggtatattgaaaaatatataatattagccatattgatcttttctcctgctcattttacttctttagaataagttctttggagcgggcatataaacacagtaatgttgctgtgtattaagtgtgctgtttcaccacagcatcatcagctttggacattaatcctctttcccacttctttttttggcaagttttccttccccgacctcccaccgttcctcctagattcctagatgcaggggaggcctctgatttattgcccaaggcaaaggagggtatgatagcaatcaaacaaggccagtgggtggctatctacaaggaacacattttctaacaagttataatgctttctatgtaatagtggaggagagagaaaaatgtttaaattttttgtctgattacttggctcagtttggcattaataatctgtctatacgtttgggtaattctgtagttttttttttttttttgagacggagtctcgctctgtcacccaggctggagtgcaatggtgcgatgtcggctcactgcaagctctgcctcccaggttcatgccattctcctgcctcagcctcctgagtagccgggactacaggcacccaccaccacacccggctaattttttgtatttttagtagagagggggtttcaccgtgttagccaggatggtcttgatctcctgacctcgtgatccgcccgcctcggcctcccaaagtgctgggattacaggcatgagccaccgcatgcagcctgtaggctctttactgggataaattgtaagcattgctagttaaagatttctagttacttgaacgtcagtacgctttctgtaccaagaattctcatagtagaacatgctgacagtttgcatttaatgagaaaaataacattagctcttacttaaagttttaaggtttgcctagagtcagtatgtgtgttggtcttgctgccttgtttactgagcattcttagcctgacttaaaaaaaattgtaagtatctactttttaaaatcttcagacaccaaggactttatgtttaatttaatggaggtcatttctatcctgaaaagaatcctaagaaatgcaagctttttgacttttgaaaatgacctgataaagtttcttagaattcgtgaggtccggccgggtgcagtggttcatgcctgtaattctagcgatttgggaggccgaggtaggcggattgcctgagctcaggagtttgagaccagcttgggcaacatagttaaaccccgtatctactaaaattaaaaaaaaaaattagctgtgcatggcagcctgtagtcccaactactcgggaggctgaggcagaagaattgcttgaacctgggaggtggaggttgcagtgagctgagatcgtcgtgccgttgcactccagcctgtgtgacagagcaagactgtctccaaaaaaaaaaaaaaaaagattttgtgagtttcttcatcttgaattgtttaaccttttactaaatatcggttatgacaaatcatttaagtacaaagaagagaaaataatctctggaggtgtttttgctttccttctgctgttttttaggactcataggactagacagttcattaatttcagctttgcagttcattttgccattgtgaagagggaattttttcttagttgatcaatgaatagcagaattagagaccgcagagattacaattattagactttctcatctgtacacatgattacatatacatttacattttaaaactcatctagtatgatttcatttatatgaaaagtccagactaggaaaatccacagagacagaaaatagattagtggttgccaggggatgagaagagggggaatggggagtctctgctaatatgtatgagatttctttttggagtgatgaaaatattctggaattaatagtgatgatggtacaaccatatcactatactaaaaagaaaccactaaattgtatactttttaacatggtgaattttatggaacgtaaattatatctcaataaaaagtcatctaacaaccatccaattttaattcttagcaagattcaagaagaaatattaattagctacataaactgcattcatattcagtggtcacaggcttgtaggcaagctgccaaatacccacatatgtctggaatgctaccatgaatttaattaaggccccaaaagctgtaagaattctgaagcaagagccattagcgtgagtgggaacagtgtcaaagacagcctcacaaatcctttcccctggatctcctaccctggtgggggatcggtcagatatacccgtgaagatgtaacctcttctattcacccatccagcttactacttagagcctctccatggctctaatcatgcactcgctttatctctgctctgtccacaaagtgagctgcctggtgtctgggactggggtttattcatcttattgtcagtgtcttatgttttgccttgtacatagcaagggcttgatagttgttgacttaaatccactaagccatttacaaaagcaatattgtattatttcaggcatgcatacatatgtgaatagcacagcttccttaataacatgtaatttatttgattgtgaagagaatggtaactgtttggaagttgtgcttctgtagatagtacattaagtatctatggtcagtggaaaaaagcttaagttttggaagcagagttctgatctcttctctgccccttgccatcttttttgttgttgtttaggttttttacccctttgtaagattcagttttctgtttataaaatgggataatagtaaatacctcccaggggggttttgtaggttaaaggatgatgatgataatatcaattacatattgcacattttctgttagcaagtggtcaataaagtatattatgtttgtcatcatattattagtggtggtatatgagactattttgggaatacaaaagtcctttatttgatcatgagttctgttggggatgaggatatttgataagctggacagactttgtttgcatagctttgctatcttaattggccttgagaagctacattaatagatgcatttcaccttaagttaatggtgctattctaataacttatttatacttttttttctaggatctaaagaagtaccacttctactattggttttgctatcctgccctctgtcttccagagagtttacctctcattcaggggccagtgggtttggatcaaaggttttcactaaaacaggtatcaacaaataaccaaaatgcacataaaattgggttgaatgtgcaagagtagttatgtagttctttccaaagacaaacaggcacttctctggatgaagacgtggtaactgaaatcctccaaaggtggtactaggagcagacttatttagaaaatgtttgtaaagtcatttttttgtatatatatttatatatgttttgagactgggtctcacccccattacgcaggctggagtgcagtggcacgatcactgctcactgtagcttcaacttctcaggctcaggtgatcctctcatctcagcctcctgagcacctgggactacaggcatcccatcacacctggctaatgtttgtcttttaatagatatggggttttgccatgttggccaggctggtcttcaacacctgggctcaagcaatctgtccacctcagcctcccaaagtgctgggattacaggcatgagccaccctgcctggtctgtaaagtcattttgaagatgtagtgcacagtaattttccaggttttcagtggtatttggtgaaatgctaagccagtaagggggaattataggaatattttgaaacactgaaagaatttaccaaaatgtggtcttcattttcaatgtggggaaacataaggcagtatagtctgggaaagagtctttgaaacaaaacagaaggcattctcctacccttgtaccaagttgcagaacttttctacctggagcagtacatgcagagttagtcggtgacatttgggatagataataagttcattagagatggttcccagaagagcagttaaaataatcaggctggtataacagagaccctaaactagagaattcttattgttgttaaggcaaagattatgtgtcaagatgatttgaattcttgaaacacatcaatcactaaagccctgaatactgatgccatcattcagggagctctcttggagctgttcagggagcagccattattgattaaattttttttgttgttgttcgtacaaatccgaggttgtggttttgtggaactaatttcccaagaggaaatataagtaaggaaaaaggattttggctgagtattgactgctggcaggtatggggtttcttttattgaggacaaaaatgttctgtaattattgctgtggtgcttgcataaccctgtgaacatactaaaaaaacaaacagcacattgcattatgtactttaaatgggtgaattgggccaggcacggtggctcacaactatagtgtaattccagcactttggaacgcagaggtgagcataccacttgagctcaggagttcaagaccagcctgggcaatatcgtgaaaccccatcgctataaaaaataccaaaaaagttagctgagccatggtggtgtgtgcctgtggtcccagctactcaggaggctgaggtaggaggattgattgagcccaggaggtcgaggctgcagtgagctgtgattgcctgggtgacagagcaagaccctgtctcaaaaagtagtaaatgggtgagttgtatggtatgttagtcatgtctcagtaaagctgttgaagattatggaaaggttcggggtaaaattcatcaggggtagattcatgttgggttatcataggagagaaagaatgtttcgttaccgctctaaaactctgattgacagcttagggaactaccatgttgtagtccctttgtgcccctaagacacacaccaccatgcccctggaaagtgttatataaaagctaagtggtattatttggaggcacttctatgttcacttgctgtaatagagtaagaggagtgtgatcagtcatttctagtcttctggttttaaggtaccttttttttgagttagtttttagcccagaactagaaatgtaattttctagagaataacaacgtgttttctgttttcagattgaagcactagagtgtgcatatgataatctttgtcaaacagaaggagtcacagctcttccttacttcttaatcaagtatgatgagaacatggtgctggtttccttgcttaaacactacagtgatttcttccaaggtcaaaggacgaaggtcagataaactttgagtatcattttattatatagttttttaaaaaatctgaagttcatgttacaagagaccactgcaaaattcaaacttgtttagatttccttagccttcaaaggatgtttaagaacatttccttatctctatcctctcccacccctacagttatcgaatcagctcctctaggtttttctagctctactacagctcagaataattttgataccttactctttttttttgtttgtttgtttgagatggagtctcgcactgttgcctgggctggagcgcagtggcgcaatcttggcttactgcaacctctgccttcctggttcaagcgattctcctggtcagcctcccgagtagctgggactataggtgcccgccaccatgcctggctaattttttgtatttttagtagagacagagacgaggtttcactatgttggccaggttggtcttgaatgcgtgacctgcttcggcctcccaaactgctgggattataggtgtgagccactgtgcccagccaataccttactctctattagtgctaaagttatttccgttttccctcctgatgtattttaccctctatgttttaatttttattcccagaactaccctgtagttcaggcccctcatatcacactcctggacacttagaatcttgtttccatgttgtgcaacactactgtagaagaatctcccttgaactacccacatttagtgtatcattcattgaccaagagcataatggtgtcttccttctggctccaagctgcctttcctgccttatcttccattattttcctcataaagcattgctccagctaatcttatctatttttctccagaatctccatccccttcccgtcagatacatctaaaactttttttgtatctttgtttttcctcgtgttgtatcatcttcctaaaacatgttctacttgtgaaaaccctaagaaattctctctgtcttattgaaattctatctccactgtgaagcattatcatggtgtggccatatatgatctatccctatctgaagtcactgcatttattccctgatcctcatttgcaggtccagtaccttgtacaagtttctttttgtgccatattagactgtaagctccaagagggcagggcccaagtcttatgaatttgtgtctgcatagtgtctagtacttgtctgaggccctcaataaaattcttttgagtgaatgaaagagtaccgtaaatgtcttttagaagtgatcagatatataggaagttgtcttagccatacaggagactatgaattaaaaatatcaaagattatgagtgttatgaagttctgaaatcaaatggaatcatctccatagccatgtgaatatatcagagctgaaaaaaggaaagcctttaactgacggtctggttattctttagcctgaacttaggatgacttttttttttaaaagcacattttaaaatcaactacatttacattttatttttcagaggaagcccacctccccttttttgttgtatttttattagagatggggtttcaccgtgttagccaggatggtcttgatctcctggccttgtgatccgcccacctcggcctcccaaagtgctgagattacaggcgtgagccaccactcctggcccagaggaagccctttttaaattgaggactgaagattgaatttttattaaaattctttcccccaggtgatttcacagaaccacagctaaattagtatagcaataagaccgttaataatttaaagtccaatctagtgtgaagtcctcttgtcatagcaggcaggattaaatggcctgtgtttggaagcgaccgtaggtcaggttgtatgtggtaaataagtggtcctccccaaagtgcagctctgccaaaataataacagtttgaacagtgctttacaattaatttaaaagggactttcacatacttgatctttttatgataagtctgtgaaacaagcgttagttactacctgtggttagttaattagtatctgcattttctgtttgagactcaaagtcacacgaccacattgtctgattccgaagcctatgccctttctttctttcttttttttttttttttttttgtttttgaggcagagtcttgctctgtcgcccaggctgaagtacagtggcacgatctcggctcactgcaacctccgcctcctggcttcaagtgattctcctgcctcagcctcccaagcagctgggactacaggtgcgcaccatcatgcccagctaatttttgtatttttagtagagatggggtttcaccatattggccaggctagtctcaaactcctgacctcgtgatcctcccgcctcgccctcccaaagtgctgggattacaggcgtgagccactgtgcccggccacaagcctatggcctttctaccattcccttgaccttggggaaactgcataacttttctttgtattagtttatctgttaaatggtggtaatgccacctccttataaggttttgtgaggattaaacatgataatgtgaataaaatgctgagcacatggtagatgctcaatatgtatccacttcctttatgtttcaacagcagtatattttgaaagacaacaaatctctggggtctcctctgaagtgctctgagggattcaccagaaacctgtccctgagactaactgcctgtctgcttgtcggattcaggcacactatccttcacttggttagggtggtatctcaggaaagcctggaattactcagcacacgtgatgaacacctccttatgggccagaaattttgagatacagttgtacttgttctcacaccacctaaggtcttctagaggagatcagacattgacctgtggaaaattaaggagaaattcaagtaatggaagataagttcagagaattgatacgggtgatactttggttggtcttctatgccttatcttattctaggaaagatcaccagaagccttagagcatgatggcctcataggagttttatagccttcatgctgcctttcctacctgtggccctgaatgttcctgtctcccctccacactgctgtccaagtgcattttctaacgtgtaaatttgatcatgtaactcttctacttaaaacccttctaaggttcctgttgacttcgggataacgttaaaactacttagcttggcgtttgaggtctcttcagttccagttcctgtccaccactagcctcatttaatatttcccaagatacatcctgtgctctggctacccctgtgccctccaaatgccgcagcttcccccatctctctgcctgcagacatctctctgtctcccttctgtcacctggctgctgcctcacctacctttctgattcattaccccaggaagcactggctgattgcttgcgccatttcatttctctcttctgtgttctggtagcagcctccttcctagcactgactagtctccaaagtaattgttgatttgcttttctgcctgccccatatccccagcctgtgagcaactttagcacagaatcttgtttgtccccactctgcgtcctcaacatttagtgcaatgctggacacttaagagacacatgatgtgagaatgctgagaggaaagagagagaattgtggactggtatgaaaattaaagaaggcttttgccgggggcagggccgaaccctagagaaataatttctagacatcattttcagtggttcttgcttttattgcattaaccttgttcactctctttagcatgattccagtttcccttcgagccacgacatttccttgaaggttttcaccctcttttttcaaaaataggcattcttttcagtatgaaatcctgcacttgtgttctggcttcatgttttacttgattctgccccctcctcctcctaccagcactttgttccctgaaaagtcactgctgctctttgagccctgtgtcctcatgtgtaggatggagaaatgttggaatccctctgagtttctctcttcaacctgtttctcttctgggttatctcattgtgcctacaactccagaaaccatttcctcccaagtaattcaattttctctcaccggcctgaacctccctctggaccccgggccatattatccagccacctgcttgcctccttctgcaccttacaatctttgccccaaggctggtccttttctggcttcattggctcagaatgatgctgcttctatccagtcacacaagccagaaatctggttatcctaccggacagctgtcttccccctaccacccctgtgtcttgtggatttcatgtcctgaatgtctctcagcctaccaccttgcgtttcttctgccaccacctcaatctctgctatactgcagcagcttcctaacaagcctccttgtatctactgtgggcctctccagttcattcccatatcatccccacagttttccttagaaaagcagatctgatcgtgtccctatcataatgaaacacctgaatgtcttcttccctgtgctctaagagtaggggctaaattctttaatacggcctacaagagtctgtgtggcctggcccctgtgggcatccagccccaagtcattccgtgttccctgccacagggcttttgcatgcaccttttgcctggaactctcttctctctcttttctttacttctacccctccctccccctacctcccctttgctccgttaagtgctcactctttcaaggaaaccttccctgacctctataaaaaggtttattccttctgttgcgagctctcatagcactgtgcatcccttcttcttttttttttttgagatggagtttcactctttgttgcccaggctggagtacaatggcatgatgttggctcactgcaacctccgcctcctgggtccaagtgattcctcctgcctcagcctcctgagtagctgagattacaggcatacgccaccacacctggctaatttttttatctttagtagagatggggtttcgccatgttggccgggccagtctcgtactcctgacctcaggtgatccacccaccacagcctcccaaagtgctgggattacaggcgtgaaccaccacacctggtccataattttacattttcttgagtgatctttgattaatatatttttctcccatttaaatgtaagctctaccaggacaggtaccctatctttgatttcccaccattgtgtctgcatcccatggcatcatgcctggtgtgtaaaatgcaatggaaggatgaattcatgcataaatgagttgtgaagactggagattgctcatgggaagcacctgggtcagtgcctggcacacagtaggccttcagtgagtagagggtagctcttattattagttcattgtaagtgttctctttaatgtgagcattctgttgtctggttaaggccacgtattttacaaagactttcccaaattgtctgtacacctcaatttatgtctaatgagttacacacatggttactggcgtgacaggagacagaatacaggggaggtatatgatctgcatggctgattcagagcaggggttcttaatttggagtagggtgcagatgcgtaatgtctgggaatgttttggaagtaatggatcctcaccctagaaaaatccacatgtgcacacagttctgcgtctaatgtcagagacgcacagagtgctgacatgcttggaggaagatgaaggaaaagacaggagttagcctgcctagtggggagcctatggattgttaaggtcaggaggtgaatgagtcctctttgttccaagtcagagtgggagctttgcatgtggaggtactgttcacttgtgtgtgaagccttggctgactatgagagagtgggtacctgcccctgaagaggacacattgccagccaccaacagctgggactgccatggtctcagttttgaccgtgaccagcatgcagctggtcactcatacatgttatcacttatccttacatgccctgcaaagtgagaagtgttgtctgcattttacagatgagatgaatggaaaagagactagggaatggaagcctcttcaaatgtgaatgatcttacctcctacagtgagaatgcttcctatagtgaaaaaggaagcagccattttttttctgctcagctcacaatgtgttggggtagagtaggaaggccagacttcagttcccaacagcttaatgggtcgaaccctctgagcctcagtttcctcagtgtgtataagcatacagtaacaacacccccttccttgtaggtggctgtgagaactaagaatcattaagtttcactcacatgttctaattgttcccactatattttcttagaatgtttttcagttttcattttcaaaggaaaattttctttgattaaccccagtttccagctattccataaaaatggagttttaaggtcccgagtcacacagccaactctgcctttaccaaaggaaggcataagagaagcccctcctgagattggcagggttgccagttcagcagcccccgggacatccaagaaagttttaccagttcactgatggtattgtctttaaatgaaagctcaaaagcaaatgcgcctgtgattggtttcatctcacttcttgggtgatgtatggttgttactgtgattgcttaatgctggagttctttgtcatttatagttaaaaatacctgttataacccaatacatgtctttgaatctgcacccacacatacacataacaaaacaagacttttgcaaaataatgctttcctttttctgttttatctttttgaaaaattctagttgtgacccagtaaatgatttaagaatcgcaaatagctcaccacctgcagtttgaaaaatgctttgtgaccattttatgaccattttggaaatactggcaaataaatgaactgtactaggtgaggttccattcattagttttacttccagctatatatctctgtttttaaaatgtcgcaaaggttttcagctattcttttacatttttaggtttttttaatatacaaactttttgtatatttccttttaatcctgtgcattttttaaaactaagattgtacagtattttgttttattgtagcattttagcataatagtattatattctacacaacatcctttttaatggatgtatgatagtatttttaccaaggttttgacatttatatttctcataattttttcactattaggactgctttgtgcatcaaatttttcctctttttcctctccttatcccctgtagttttaattatttccatagaaaagatgtctagatgcggaattactgcgttacagagtttgaggctgagcgtggtggctcacgcctgtaatcccagcactctgggagacctaggtgagaggattgtttgaggccaggagttcaagaccagcatgggcaacatagcagggctctgtctctacaaaaaatttaaaaattagctaggtgtggtggcacacacttgtagtccaagatactctgaaggctgaggcaggaagattccttgagcccaggaatttgagtctgcagtgaactgtgatcgtgccactgcactctagcctgggcaacagaatgaaactgtcaaaaaaaaaagttagaacatgttaaggttcataatcagtggtgtgctggtaaatgtttaacagccagctcttgtgaggtaggaatagtcctgtttttgtagtgttttcttacttgtatggtaccagtactaccaccatggccaattgcaggctaccagtgtgaagtcctggaatgccgaattgaaaagagacattaacagttggctcccagaaaagcctgtatgggccaactccagcacaacactgcttatcataaatgtttccccaagaccctgccagcttccctcctaccagctgtgtacccttaccaggatcagatgttgtagtattgtacacatgtgttaggttgaaaatgggccttaagttcttctctcaatgaaatgtggattccacagtcgcactccattgctacaacagatcaccatctttcaggccagttcttgtgattacattaaaaatagctcataacattgtcccattaccaatcttttggggaaggttacttgactcttctacttcattcagagcagttattgaagattgaatgtttgggaaatgttgtgtaatttcaacaacattagcctttaattctagggctttaaaatctgtggacaagagcaatagccaaggagcaacaatttatatgctgttagttgggctctttcttcacttagtgatctctccgcatcttggcagctgtctgtgactttgaagtgcattaggtatttcagttttttcccccatactttaaaaacgtgtaatctcctttgtgcatttcctgttatatcaagtgtttgagttctaaagacagccatttgttagattagcatgttttatgggatcattgtggaaaatgttcttgctgaagacaagcaagttggcaattttgccctcttttctttctcacagtgtactttttcagcaaattgcttggcagactgatcatgactgaatcatttcaatgaattgtatgctctcagccaagtagaaaggaacatttatttcataaagcttctaaacaaagtttttcttcagttacgttgagcttctttctgctgatttgtattacaaaaggaagtgatttgcccaagttcgcacaattaatttgtggcaaagccagttctaaaaccagaactcctagtcagtgattatttatgaaaaatattttttaaaaaattctgtttaaccgtagtataagctggcttacctagcattgtgccaactaatcattcctccaatgattaagatagattctgagttgattcctaaagcacttaaagattttggggtcacttttgaatcatcaaagaaagattaaatgatgttcagcttagtgttaaatggattttgtcattttcctattcgacgcctgccttctgcacttatgcctcatatgggtaggaaagttaccttaaaccattttcaagctgacctgcttttatgggtaagtggtagattttcctccttagcagatcattcctgctctctatagcccatgttaggtcaggttgctctaagaaacttattcctagtcttttctgctcaaaaaaagatttttttttcactattctaccccattgcctttgtccttagggtaagaaatatgcttattctttgaaattaagcatccacttgtagcatctaacataatattctagtttatataatttagatatcatttagttccaactctacatttgcacatgataaagcctagaccccgagaatatttgatagactagaacttatccctttcttttctttgccagttaagaaaaaataaccttgaaactgaagacagctaactatgtacagtcacatgccacatgatgtttcagtcaacaatggaccacatatacggcagtggttccataagattataatactgtatttttactataccttctatgtgtttagatttgttcagatacacaaataccattgtgttacagttacctacagtattaagtatggtcacatgctctccaggtttctagcctaggaacaacaagctataccaggtagcccaggtgtggtgtagtaggctatacaatctaggtttgtgtaagaacactctgtgatgttggtatgacggtgaaattgcctaacgatgcatttttcagagtgcatccccatcgttaagcatgactgtcatggtggtggattggactgaacaaagaggtcaatgaagttactgcaagacagtgtatttatgttgcttttgttgttactatttgttaagcgctggcctcattctcagtttctgtgctaagtgcagttaagaattatcctataggccaggcgtggtggctcacgcctgtaatcacagcactttgggaggccaaggtgggcagatcacctgaggtccggagttcgtgaccagcctgaccaacatggtgaaattctgtctctactaaaaatacaaaattagccgggtgtggtggcgcatgcctgtaatcccagctactcgggaggctgaggcaggagaattgcttgaacccaggaggtggaggttatggtgagctgagatcgtgccattgcattccagcctgggcaacaggggcgaaactacatctcaaaaaaaaaaaaaaattttatcctatagatgagaaaattaaggcatagagaagttaagtaaattgctaaaggttacacaagagcaagtgatccagaatgtttgattaagggcccaggtttatgaagtcatttgcaaattgtaactcagtgtctctgtaggaacggcattttctagattgatactgcctaggttcttcctaagtaacccatttaatagcctttgtgtgttttttgttgttgtttttcctttgctggtttgaataccctttagatactctgtaagattgagctttgatatagtctgtgttgttttgtgacctatagggtattttcttcttaaacattctctaaagttctatgattctggagcctgaagaaatcctttgagatgaaaggttcaaccccttcatcttgcaggagagaaaggaacttcccccaatgtcttaggatcagttagctgcagaattaaaacacatacctgcttactgttaagcaagtgagtttttcactacatcaggccattttctaattgtaagctgtttcaatgttttggaagtagaaatgctagtttctcccttctccccctttttacacttgatagagttgtaaatgctgttttttttttgttgttgttgttttgtttttgagacagagtcttgctttgtcacccaggctggagtgcagtggcccgatcttggctcactgcaacctccacctcccgggttcacaccattctcctgcctcagtctcccgagtagctgggactacaggtgcccgccatcatgcccggctaattttttgtatttttagtagagatggggtttcactgtgttagccaggatggtcttgatctcctgaccttgtgatccacccgcctctgccttccagagtgctgggattacaggcgtgagccactgcacccggcctagagttgtaaatgctttttatgaataaaagcaatgtgaagttgaagcgacgattgctaaataaatgtagttgtgtggcagacgctatctgtcatgattggcagaggggagcaaaataaaaagatgtccctgatggaagagtagcaggtggggtggccacatggaccagaagagctcaaggaagacaacttcttaattcggtggaagccctggactggaaatcttgttctcagagttctctcacttctcatccgaagccctctttttttaaatcttactttcacattctcacctaggagaatcccagggttaaaatgccatgagaccctgtaatgttgagaaaggaaagaaggaaggaaaaggaacttgctgagatgctgcatcacagttttgtatggaagcttcaggtctgcgtcagtcaggcatcacttttcctgctctagctgcctcccaggatccctgctcaagatctttgcagagggggagtccgtgtattgaagcctggagaaatgtactagtctgtcatctattcaatagatacttgctgactctcaggcactgtgcttaggtaactagagatggaaagatgaatacagtgctcttgccttcacagagagttataaaccagcaagacatcaaatataacatgcatcctgtgttttctttattctaaaatgcttgtttctccatattttaatttttctacagtcaggaatttcttacaattgtgtatatttatgcagtgaaccctcttttaagcaaatattttcttcttttgactgtagacagctagtgctaagatgatagtgtacataagaatcacatgcggtattcactggacatgcaggtattggtggtacctagagaggtctgggatcagattgagtgtatgtatgtgtgtggatagggtgttgtgcaagttcatcaagcttctaggcaattctgatgcaggtggtctctgctggaccatactttgagaaattgctgcagacaatcaagaagtttgtaacttgcacattagaatcacctgaggatcttttaaaatgaccagtactcaagccagactccagatcgattaaaccagaacctctggaggtgggacccaggcagcagtatttttgatagctccccaggtgatacccaagcatcttcaagtttgagatccacggccattagaaggttgaggaggagcagtgcttctgaaacttccatgggtgtatgaatcacctgggttcttattaaaatgcaaactctgattcagcaggtctggggaggaggccggggattctgcatttctgaaggctcccagggaaggctgatggatgcatgctgctggggcatggaccacattttgaggagtatgggaagatgtagggccaatccagagttttcaagataatgacagttcagagatgttttctttggtctgtaagagcaccctctctaatacaccccaaattcaagtccatggagtggaccagctgcatcagaattattcaggagcctggtacagataaagatacagattgctgggctcaccactggagattctgagtctatcaccaataatgatattagtagctctatgtatgtgctggacttttcatgtttagtatcagctcatttaatcctcactacagctctatgaaataagtaatatattatttcctccatgattaaactgtggcttggagggttgagtacttttccctaggcctcatttagtaagagactactcagcgtagtaagctctgtttttaaaagtgccctagatgctgaaaccttatctctgtgggaaaggaaatctcaaataaaaatatttcctgaaaggatgaccatatctatgaacctgtttgtattaaattaaatacgaatctgtctatttgcgtttaagaaacgaacatgcatttagaaaaaaaatgcttcaattttaggaataagaaaattttatataacggaaaaggtagcaaatattttaaagagtgtctttgaaataatacagtaaatatctgataagaccatagtaaaattcattttcagagattgagcagatgaagactacttaattgtccttcaaaaggaaatagaaaaaatttggtacatcaatacaatggaatgccattcagccattactcacaatggttatagaacatttactagcatagaagacagttcacaatacaataagagatatgaaacaatatttaggccaggcgcagtggctcatgcctgtaatcccagaactttgggaggatgaggccagtggattgcttgaggtcaggcgttcgagaccaacctggccaacatggcgtaaccccgtctctactgaaaaaatacaaaaaattagcagggcgtggtaacacatgcctgtctgtagtcccaggaactagagaggctgaggcactagaattgcttgaatcctatgaggtggaggttgcagtgagccgagatcgtgccgctgcactccagcctgggtaataacggtaataacgtgagactctgtctcaaaacaacaacaacaaagacagtatttatagcatgatcccatgtttgtttcaaagtcctagtaattaaaatatatttatgcaaagaataagttcatgggcagttatacaccaagatgttaatagttctctcaggatggtggggttatgggtattcttctgaatattggttaagctcctactttgtggctgatactataccaagcattgtgggaaataaaagggagtgtttagggtgattccatccttacagaactaactggatctagatttaacaaaaatttatcagccgtgttttcatttaacccatgctatgcttatgaaggaaacctatgggtcaatttatggttctctgccagcaatttccctccctcacccctactcactctacatccttcctttctttcttccacccatttatccatccatctacttttttatcatacaaaaaacattcaccgagtgtctgctctgtatttatgaaggagagatgaaaaagatactttctgctctccatatgctctttgtcttccttttattaaaataaactttttattttgggataattttagatttacagaagatagtggcaaagacagtacagagaattcccatgtaccttcacccagtttcagttttttctaatgttgtcacattatatcaccacggttcatttgtcaaaactaagaagccagaattcttacattactattaactcagctctagacatttccgatttcaccagttttttcctgcaatactctctgttcaggatccagtccaggatactacattgcaattcgttgtcatgtctcctccttagtttcctctgatctgtaattgcttctcaggctttctttgattttttttgatgaccttgacatttttgaggagtactgattagttatttttatagaatgtcccttaatttgcatttgtctgatgttttcttgtgattagactggggttatgggtttttggaaaaaataccactgagtgaagtacccttatcacctgatatccacatgacatccttggtaatgttaaattgattgcttgcttaaggtaatatttgccaggtttctccactgtaaaaatactattttttctttgaaagtaaatcagtaattccagctacctttaaggaggggaaggtttaaattttgcttctgaagaggccagtatttgcttatatagtttggaaattttctttaaggaagacttgtcccttcacatttattccattctttatttatatcagtgtggactcgtagatacttattttatactttgggttataattcaacatcatattatttatattgttgcacaaattgttccagccttggctattgataactcttacagttggtgcctgtatcaccttggcatgccccaattcatttgttttttgagtacctccttctttcctgatattataagatgctccaagcttctcttgtattttccctgcctgagccctagaattaaccatgtgtccaaggagccccgatttattttcttggagaatggtatttagaagtcagtatctgggtgctgggtgctcattgtctttgaaaggaaggagacagaaaatgaaaaatgttatatacaaggttcaaagagctgtgaaagcagcaaggacaggccaactacttctgccagcagaagtcttcactgaagaaacggtattttaaattgagtagagttttccagatgaagatcgggattggagtgggatgggaaaggggagggaggaaatatatgttagcaaaatcaagagtaactggctgtttaacttgatctgactgtacacttacattggtagtggcccttctttgattttctcattgcataaaaatgagcaattttcacagattatatttctttgtttacaagaggattttctctacaaactctcttgactgtcctccttcattccccatcttccttccagtcttttttccttctacgtgtatttagctcctactttctgccaggcacaatgcaaggcacagggggtgcagacaagaatttgatagcccctgctatcaagaagttctgtagtgcagtgtgagatcctgtggctttcttctcctccccttagccctttaccagatgtttaatttttaaggctttgcagaaagcataaaaaagcaaagaggaagtatgagcaatgtctgtattgtgaagctgacatgatactcgacttactcagaaagtcttttttgttcacagataacaattggtgtatatgatccctgtaacttagcccagtaccctggatggcctttgaggaattttttggtcctagcagcccacagatggtatttacaagagtgtgtgtttgtctgtctgtctgcctttgccagtatatgttttacaatgtgtctgtttctatttgtatctctgttttcctaaatgcattattttttcattttgggcatggaaaccaggtaatcaataaatcagtcataacccaatttccatactagtgaaccttaagcaggtctgttagggacctgcatactctgatcattctgtgctaaagatgttttagtgtatggtagagttggtagccagaggtcctgacacaaattctgtagccctcccttctagctgtctgggtttctttcagataggattttcctactgctgtcattctccatttttcttaaccctaaaataattaaaacagaggatatcttaaaagccaatatacatttgaaaagatgcccaacatcatgtcattaaggaaataaaaattaaaaccataatgagatgctactacatatccaccaaaagtatttaataaaaatgtctgtaccaagtgttgtcgaagatgtggagcaaatactgctggaaaaatgttgggcagtatctaccaaaattaaaaatatctatggctcagcaatgttactctcaagtatattactcactgaaatacctacatagatagaagcaaaacacatatacaagaatgtttacagaagcattattctcaataaccaaaagctgggaatagttcacacgttcttcaataatgaaatgaataataaatttaagtatatcccttatgatgaaatgtcatatacaatgaatctgagtgaactattaatacagagatcagcatggctgaattttaaaaacataatattaagtgaaataagttggacctaaaataatacatactccatgattccatttatgtaaagttaaaataggcaaaaccaatgtatggacttagagtagttgttacttttgaaggcagtggttaatgactgagagaaggcataagacagccttctttatacttgggatttgtgtaatgtgtctgctttacttaaataaaaatgtttatttaaaaatatgaagatagataaattatagattgttctctgagggagacaatctacaattatccaggtggtaagtctacacagtgcaaatgggcttcctaactactgactgaggtactgctgcttaatatggaagttcagatggggagagcagagggaaccaaaagaacccacgtcctagaggattttttctaaatgtcttgtgagcattttttccgcatttaaaagatttacttgtcggaattatttatgtgcaatatgattgtagaaagaaatcacctagaaagaaatcacagccaattcatttttcagcctctaaacacttggacagaggagccatatatgaatatgttcaaaagagttaaggccatctcctgtgggtatcagagaggcataattagaatgcattgaattctctccaactggtttgctgaagctcttatgtgagctttttcttttccttcctttaaaaaaaaataataaataaataaaaatccgggcatgacaacaggagtagcagtttccagtctgttgaagttgtttgcttccgtgaccgtaccatgcagggggcgagagacgttgcccacagcatcatcttcgaagtgaagcttccagaaatggcatttagcccaggtaatttgccggtctttgaaaatgcatataattatcatttatcagaaacggaaccaggtttactttcttttcatatcgtcacaatggcagaagaaaggaagagaaaagtacaacttgtacctctttgccaatgcagacacctacttcgaacagagggcatgctctgctattcagactggaacaaaggcaaagattgtgaccaggaaattttctctaggcagttttttcagtcttcaggatttgttcccctctgctccccccgttttcaattttacttttctttaacacaaaatctttattcctgtccattcttaaaggaaggatgaagtattaatgcacttaaatatttatttgttatatacttaaagttgtatgtgatcctgttcttcatatagtaaaccagtcaggaaaaatgccatttctccttccacatttaatatcttcatttgatccttatgtgacagttatcagcttttacccccattttataaattgagaaacttagactgagagacattttatctatagagagatatatgtgtgtgtgtgtgtatatatatatacacatatatatatttacatatgtcacagagattgaatacatattcaagtttgagtaaaataaggatataatgcccagctccggatatatttctttttttttttttttttgagatggagtctcactctgtcgcccaggctagagtgcagtggcgtgatcttggctcactgcaagctccgcctcccgggttcatgccattctcctgcctcagcctcctgagtagctgggaccacaggcgcccactaccacgcccggataattttttgtatttttagtagagacggggtttcaccgtgtgttatccaggatggtctccatctcctgaccttgtgatccgcccacctcagcctcccaaagtgctgggattacaggcatgagccaccgctcccggccagcttcgggaatatttcttacccggaatccatgtcctatgtcaaagtcagagcacgatgtctggcacatcataggtgcttaataaatgttatgtaaatttcctagctcacataaagcccagcacttttatacttcttgccagaataattcctcatctctatgtgatttatatgcttttcagagcactttcacaacatttattattattattattgaggcagagtctagctttgtcacccaggctggagtgcagtggcatgatctcgactcactgcaacctccgcctcccaggttcaagtgattctccctcctcggcctcccaagaagctgggattacaggagcccgccaccatgcccagctaatatttgtatttttagtagagacaggtttcaccatgttggtcaggccagtcttgaactcctgacctcaagtgatccacccaccttggcctcccaaagtgctgggattacaggcatgagtcactgagcctggcctcatatatattatttagcttgttccttatatcatcctcatggttccaaggcacatttctttccttatgccatagatatgccttaaaatgtgtgtgtgtgtgatgggggaggtggtgtcaaaatctcttccaaggccaggcgccgtgggttatgcctgtaatcccagcactttgggaggccgaggcgggtggatcacctgaggtcaggagttcgagattggcctggccgatatggcgaaaccccgtctctactaaaaatacaaaaatgagctacgtgtggtggcgggcgtctgtaatcccagctctcaggaggctgaggcagaagaatcgcttgaacctgggaggtggaggtgtagtgagccgactgcactgctgcactccagcctgggtgacagagcaagactctgtctcaaaaaaaaaaaaaaaaaaaaaaatctcttctgagatatcttttctagagtgctacagtcagaaggattcaggattggcccacatgacattttttcagcgattctatgctctaacacagatgtctttacacaattcgctgaaagattgacagagtacttctgcttgatcaaaggacgatgctgcttttcagtttagagcctttgcctttctgctgtttttagatatttgcattggatgtagcaccctctcctggcaaattctaaaatagctcctgtgtaatgttaacttacatgctatacctttgttttattaaaccacacttaaagatagtcgcaggggtgtccaatcttttggcttccttgggccacactggaagaagaattgtcttggaccacacataaaatacactaacactaatgatagctgatgagctaaaaaacaaatgcaaaaaaactcaatgttttaagaaagtttatgaatttgtgttgggccacactcaaagctgtcctgggccatgggttggacaagcgtggtcttagggaatgaggtgagagttagctaaaaagtaatgtgggtctggtctgtgtgtctgacaagctgccaggcaccttccatggggtaatcacttaattctgccaaccactctgcagagaggcagttttctttccacttttatgacaaagtcactgagttattcttacatcctactctctatgataaggctcatgcttgatgatgctgacattttttttgctttttttgagacagagtcttgccctgtcgcttgaggctcgagtgcaatggcacgatctcggctcactgcaacctccgcctcctgggttcaagcgattctccagactcagcctcccgagtggctgggattacagtcgcgtgccaccacgccttgctaagtttttgtatctttagtagagtcggggtttcactgtgttggccaggctggtctcgaacccctaatctcatgatccacccgcctcggcctcccaaagtgcagggattacagatccacccgcctcggcctcccaaagtgctgggactacaggcatgagccactgtgcccggtcatttttttttttttttttttttttgagacagtctcgctctgttgcccagactggagtgcagtggcaggatctcagcttactgcaatcctgggttcaaaagcaattcttctgcctcagcctcctgagtagctgggactacaggtacacgccgccacacatggctattttttttgtattttagtagagacggggtttcaccgtgtacccaggctggtcttgaactcctgagctcgggcaatctgcctgcctcagcctcccaaggtgctaggattacaggcgtgagtcacacgtccagccgatgctgacatttaaactcaggaaccacaccgtacatttccatttgaaaaaggttttctgtcgtccactaatgcctttaacacatcttcttaatgcctgatattaaatgtagattatttagcttaggaaaggcaaatgaatttcctgtttttcatgtaaattaatatgttccctcttagctgtaaataaaactttatggtaaatacaacttcataaagaatttttctatatcataatgtaaactgaaaatataagtatggttgtacttttcaatacttctaagacatcccatagttgccatggtaatggtataaggagtattattttaaattattttattttattttattttttgagacagggtcttgacctgtcacccaggctggagtgagtgcagtggcaaaatcatagctcactgcagccttgacctcccaggctcaaaccatccccccagcttagcttcccgagtatctgggactacaggcatgtgccaccacacccaactaatttttgtattttttgcagagacagggtttcactatgttgcccaggctggtcttgaactcctgggctcaagcaatcctctagcctcagccacccaaagtgctgggactacaggtgtgagctaccttgcgcagtcgaggagtattattttaaatatcctatgtcttcttttgcttcctcatggtgtgttgtgttacagctctggcacctggtggaggaagatggcagacactgctgcgggtagagatcccatcttaactctgttttttcttgtgctgctcctgcttgcccactatgggagacagcacctaattttttcctaaaaaatattttcttggccaggtgtggttgctcatgcctgtaatcccagcattttgggaggccaaggcaggcggatcatgaggtcaggagattgagaccatcctggccaacatggtgaaaccccgtctctactaaaaatacaaaaattagctgggcatggtggtgcgcacctgtagtcgcagctactcaggaggctgaggcaggagaatcgcttgaacctgggaggcggaggttgcagtgagccaagataagtgccactgcactccagcctggcgagacagcaagactctgtctgtctctctgtctttctagctctctctctctctctctctatatatatatatataatttaatttggtgtatgtcttataggtatagattatatggatgcaggtatggtaaattacatactattgccatatgtgttatttttttcattattaagtttaaagggcatctaattttcttagaaatggctatagcctttattattattattattttttgagagatgaggtcttcttatgttgcccaggctggccttgaactcctgggctaaatccttcctcctgcaatctttcctcctgccttagcctcccaagtagctgggactacagacatgagcccagcatctgtaaccttttgagtatagagaacttttaatttgaaattatgtcttatttttgtctaataatttcttacctgtatcaagagaaaacctaggctggagttatggattacaatactaggctgtgattctgtagttcttgtcaagttccttgctatgtatcaaagacacattaaaaaaaaaacttttattttcggttcaggggtatatgtggtttgttatataagtaaacttgtttcccaggggtttgttgtacagattatttgatcacccaggtactaatacctagtacctagtattttttctgatcctctccctcctcccacccttcaccctcaagtaggccccagtgtctgctgttcccctttgtgtccatgagttctcatcatttagctcctacttataactgagaacatgtagtatttggttttctgttcctgcactagtttgctaaggataatggcctccagctccatccatgttcctgcaaaagacatgatctcgttctttttttatggctgcatagtatttcatggtgtgtgtgtaccacattttctttatccagtctgtcattgatgggcatttaagcagattccatgtctttgatgttaagagacacatttttaattgaatctaagagtagtaataaaatcaaacaaaatatcaattaatggcaggtgggaactcttttttttccccacagaaaaacaattctgaagtcttaacctctttatgaaactcaaatctgactgggtatggtggctcatgcctgtaatcctagctgctccgaaggctgaagctggaggatcacttgagcccaggagttcaagaccagcttcagcaacatagcaagaccctgtctcaaacaagaaaactctattatttcagttttaatttttcatggcattaaaaaataccacatcagagtgcccgatttaaaagggggaaggacgtttgttttctggcttcttgctgtgaatgataccctcagccaaactggggcccaactagctttcaaggataattggtcctatggtttctcattgaccgtcctatcccagaaacaaaagatcgtgtaaaggaaatcagtaccttctaggtcccgtaattatattgggcaatactatttttttaaatgtcaacagctgaaaagtttcccaaggaaaggaaaattgtgatcttgatagaaattcaaaagtaggagaatggacaaagaaaaccagtgtacaggccgggcgtggtaactcatgcctgtaatcccaccactttgggaggccaaggcgggtggatcacgaggtcaggagatcaagaccatcctggctaacacggtaaagcaccatctctactgaaaatacaaaaaattagccgggcatgctggcgggcgcgtgtactcccagctactcgggaggctgagacaggagaatggcgtgaacccaggaggtggagcttgcagtgagccaaaatcgcgccactgcactccagcctgggcgacagagcgagactctgtttcaaaaaaaaaaaaaaaaaagaaaagaaaagaaaaccagcgtataattagaaacaaaattaaaattcccccagtcccatacatcttaacttcaagtcaaggagtttctcttcctgcagagtctgttgcttaaggcagacagtggaggtgatgctggaagtgtaggctgtggtggggtgaatttcttgcttagtagttcaggttttattgtgagcagtgggaattcaatgagaaagggggagtagcagaggtcctgagatgtagggagcgcaagagagtgggatccactagcaagatttacaaggctgtggttccaccaaggcaagcaaagctttcattaacatgagaaggtagcaggtgtgttctgcaaagcaattgagatgtttaagagaattttgcaacagtagaatacagcagtgtttccctgaatgtgtcccttgagattgtaattggtatacagggaaatgaagggagatatggagagccacgtaagtgtgggaaacacaaagccaaatcaaatcacgtgggttctgtactgcaggtttctcagagcttttatctccctcatgtgcaatgtgaatggccaggtttgagtggtagtgggggctggatatagaagacagatataagtatagaagcatttccaaagtctgtttagctacaggatccttatcctctgagattattgaataggacacactttgggaactgctagaattggagttaattggagttacagaggctcccatagcagggattaaaagagggctgcggggaagggagaagtcagggaagggaaacttctgaatggataaagatgagcttaaaggaaagggcagcttaatcaaatgacagtcaccttggactgtgatctgctcacaggtacagaagggacatacttaatttaaggttcaaatcccaataggaacctcagtgaaggggtgctgcagttacattggcttggcttgcttagatagagaagcctcagtggggttatacctaccccagaaaagattgtctttttttttttttcagcaacttccaataacagtgaaagttgagccaccttgggccagagttgagggctatttcagaagctcctgtacaggaagattgcttgggtttgatggtccctaaacaagattcccagtagttgggaaagatggggaggcaactgtggcaagtctgtggaaattcaggccctcaagtctcttttagaaagaagcaaaccaaaagcttgtcaatgcatgggccattatgaatgtcgatcttttttatgtaaggtcgttgcttgatctgcttgtttttattcttccctccttcattaaactttgtgttttatttgccttaagattgtcctaaagcagttggatgggaaaagaaccagaaaggaggcatgggaccaaggatggtgaacctcagtgaatgtatggaccctaaaaggtatatttgggaagctgttttctccagtcgggctttttgtaaccaagacacacaccaagttctgtcaggccaacacaacattgtgtaattcagcccagggggtgccagtcatgctgccgtgtgttactctgctcttcaattgaagtttggttgtgagaattaatattaacaatgcatatcctgaagggcacactcttcatctgttctagacattctaaattttgttcttgtttaaagctcatgctctcagaccaccagcgtacctgtactgccgttcagtcctttatgcattgtcctctagcttggtcctattggcccactcccccgccccgtcccccaccccgccccagacagagtcttgcactgtgcaggctggaatacaatggcgcaatctctgctcactgcaacctctgcctcctgggttcaagtgattctcctgcctcagcctcctgagtagctgggattacaggcacgcgccaccatgccctgctaattttttgtattttagtagagacagggtttcactgtgttgcccaggctggactcgaactcctgacctcgtgatccacctgcctcggcctcccaaagtgctgggattacaggcatgagccaccacacccagcccttattggcccaccttgaaggatattagaagaattatttcatggaagccagtattgtgtttaagggcgaatctcagtgcactcttttttttttttctttttttttgagacagagtttcactcctgttgcccaagctggagtgcagtggcatgatcttggctcactgcaacctctgcttcccgggttcaagtgaatctcctgcctcagcctcctgagtagctgggattacaggcgcctgccaccacacctagctaatttttgtaattttagtagagagagggttttaccatgttggctaggctggtctcgaactcctgacctcaggtgatccgcccgctttggcctcccaaagcgctaggattacaggcgtgagccgctgtgcctggcctgagcgcaggagatatgggaggccttattaaggagatatgggagaaatttctgttttcagtactaggaaaaactttcctcttaatcagatggtgtgtttttattcatggacaccatgattcctatcactggtcatgctcttcccttttcaccttggctgctggaactcagtatcaaatctgtggccccctcgttgcagaggactccaacagcatgctgctgggtgggaagctttctcctccctgcttaccctccagtttaattttctttttcctttgatcccaatttccttattatttcttattttcttgcatagccacttgaaatctttcagaacaagattattgcataaaggagtgactgaataagtaaatctctccttttctaggttagctgagtcatcagtggatctaaatctcaaactgatgtgttggagattggttcctactttagacttggacaaggttgtgtctgtcaaatgtctgctgcttggagccggcaccttgggttgcaatgtagctaggacgttgatggtaagtcggaggtggggggtgcaaatggcacctttgaagttgtagcttctcttcttgttttactctcatgattgccttccatctcccagctccccatcccctccatctctccctcccttcctttttccttttcttatctttttaagtgtaaaagaaatacaaccttttatcatcagatagaaacagaaagtcctccacacccatcgcaagtcccatttcctattaagcagactttgtagattagtatgcagcctttttcccagatgttattgtagacatatctaaatatagagaaatcagtatctttgctgatatttatttgtatttataaagattagatcatagcatactatctataacaggtttttatttttaactagatagaaaaatgactgtagctacctttctgtgtttccatagtatgtatgtgtagtattttgttgtatgactatgttctttatttaatcaatttcagattactttctatttttttctattagatactgttctctattagagaacattcttatacttgtatgtttatatatccataggatttttttttttaggaaaaaaaccctggacatagaattactgtgttagagagagtatagaatttgaatgtcaatattttatatatttgtttgtcattaattttttttttttttgagacaaagtctcactctgtcacccaggctggagtgcagtggcatgatctcagctcactgcaacctccacctcctgagttcagcgattctcctgcctcaacttcccgagtagctgggactacaggtgtgcaccattacacttggctaatttttgtatttttagtagagacggggtttcatcatgttgtccaggctggtcttgaactcttgccctcaagtgatccgcctgccttggcctcccaaagtgctgggtttacaggtgtgagccaccacgcctggccaaacatgtttttcaaacgaaattgccttccaaaaatgttacacatatgagacacagaacttttttccacgctcttgccaaaactggatatatcaacttttgaaatctcagtcagttaagtaacatttattgtttgaatttgtgtttctttaattagcaagggtgagtttaattttatttcttttgtgagttttatttcttttattcatgttctttgggttgtgtcttttattgatttagagttctttttattggggcaattaaccttttttctgtaatatgatgcaaatatttttctcagtttatctaaggtgtctttagccatataaaagtttttttcagctttatgttattatatgtgtcagtcttttcctttgtgggttatggaactcttgtttttatgttagagctttatgaatgtggaaattttttggttacatgataaggggtaaagatctagctacttttgcacaaaatggattgttagttgttttaatggcatttattcagtaatctaaatcatcatttttctgtctttatcaaatgctaaacccccttatatacctgagtctctttatggattctctattttgactcattgatctatttttttattcctatattcatgctcactgttttagttgaaattacaatgaatttatagataaattagaagggattgatgtatttttatgacattaatccttagttctgggagcatggtgtatctcttaattagatcatctttgtttttcagtagcattttctttatataggccttccatgtatctaattgggtttaaatatggtatttctgcatatttaatgatgttttttcctttagagatattttctcccgttaaactttccagttgactattactgggatgtaggaaaaatagtgaattttgcatatttgtctttggccatctttctaaactctcttagttctaagagttttttgattcttttgtagcttaatagtattcctcaccaacacttatatcttccttttccttgtcttataagattggctagaactccacagtaatgtagaagaatggcagtgagagttgatatctttgttttattgctgactttaatgagagtgcctcttgtttttatctttaattttgatgttggtttctggtaagtgttctttataatttaaagaagctgatttctgtttctgcacgtttatatcagaaatgtcgagctttatcaactacgtttatcaagacaaagtattctaatgttgagcattcctagaataaaccctatttgtacgtggtatcttattcttctcatatactcttgaattcaattagtaatgttttgtttttaaatgttacattttggccgggcacggtggctcacacctgcaatcccagcagtttgggaggccaaggtgggcggatcgtttgagctcaggagttcgagaccagcctgcacaacgtggcgaaactccatctctacaaaaaaaatataaaaattagccaggctgtagtggcgcgtgcctgtagttgcagctgctcgggagctgaggtggaaggattgcctcagaccaggaggttgaggctgtagtgagccaagatcgtgccactgctctccagcctgcgtgataaagcaagacactgtctcaatcaaccgatcaattaaccaataaattttacatctcacttcataagtcaaattggtttatagtcatgttattccttgttctatctttgtatattttatagctacattatgctagctttataaaataaacttaaaacgttctgcctttttctaagttccagaacaatttaaataaatgaattatctgttctttgatggttaggtaaaattcagttataaatccgtctgggcctgatgcatttaagaattttgttgggccgggcacggtggctcacgcctgtaatcccagcactttgggaggccgaggcgggcggatcatgaggtcaggagatcgagaccatcctggagaacacggttgaaaccccgtctctactaaaaatacaaaaaaaaattagccgggcatggtggcaggcgcctgtggtcccagctactcgggaggctgaggcaggagaatggcgtgaacccaggaggtggagcttgcagtgagcggagatagcgccactgcactccagcctgggtgacagagcaggactctgtctcaaaaataaaataaaagaattttgttggttggggtagtaagggtggtgggaatctttgtaaacttttacagatgtttctgtgttgactcacctttttagattttgtactgcttttctagctttaaaaattaattgacataaaatacatatggtattctcttttaaatcttccttttatcttttaaaaaatcttttcatattcctaatgttgtatatttgtgttttctcttttttcctcatattaagccttgctagagaggcttgtctatcagtttttttggagcattactttatttattctataatttttgtttctgtctcattttgctttcagattcgtaaatatctacttttatctttattaattttttcctccttctgtggaatttattttactgtctttttctaggttctagaatttttagatgcttagattttcctaacatttttcaaaatttcaaagtcaacataaagccattatagaaaatataaaagtcataaagcaggaaagaagacactcattttcctaccgctttttcacttgtcacatttcagtgtttaatgtgtattttaacattttattagatatataataatgtcctttgctcttaccaattaacatgtcattaaaaatgatgcctgtctatgaggcctttttattttttgggacaggttctggctttgttgcccaggctggactggaccttgtgatgttcccaccttggcctcccgagtagtcaggactgcatgagttcactgcaatgtctgctaaagctttatgactgtagaatatgccttctgataggatgaaacataacttactgaacccttctcctaatgttcagcattaacattgtttccagttttttacaattgtaaattgtgctgcaaagaacatctttgtgactgcatcttggtcagtatgtcagattatttcttaggataaattgctggaaataggtcataggatatgggtattcttaagattctagaaacatactgccaaattgctttccaggaagattagaccactttaacattctcaatcagtaggatgattttctccctaccacatcctcaccagcattgagtattgtgattttctttaatctttgcagattagccatttaaactgtgtagcattccaggaaaccaaaagttaagtgtgtgcaaatacacctgcatgtgactaacctatggcatgtttgtaatgtatctggctttcttcccactacccagcacgttcccagagtgccttccttgctatccactcatcagttgctttaaggaatgcaaaaatacttcagaaataaacattcccaaagcaagcacaagtgactttattctgcctccatggtaggttgcttagatgatgaaaataatttacaaaactgggtgggtagaccaaaaggttaccagtgggcttcaaaacagtcagtctaacctatgcttatgaaaggcagattctggcctgtcgttctcgacacagaaaacaaatcttgggtccttgttggctggatctctgaaaccttcaatctaattgagtctctcagtttctaatggaaagatattgaaataagagagagcagaatcttagccttgtagccagtcatggcaggacatctcttaggtcagtatgcttacttatgatctactaaaatatacccactgtaccctaccccaagaagtaggcaacttcatttggttgcacctctggagagctcattcattcccaccattaaccagatgtatctcttaggcaaatcacttatctttcctgggcatcagtttccatatctgtaaaacaaagtaattggaccaaggattttagagatcccatctacctttaaaatcgtatggttttataaaactgttataggagacataattgaagtctataaaaccgtgaaaactatttctaagaatatagacttgttccctaaattccagattattaataaggctttgcctcttgaagaaatggtacaaaatgttctaaaatatcatacagtgggaaataatttgtgagtcattttttggaggagttcattcaggctttaaatgagcttcaagagtagttgttatttatacttaattattcgttaagggaaatcaaggacatttaggggctattgctaatctttttaaaacaacaacatagacaattcttatgggattcacctccaaatctttggtgacactgtcaaaaataattattagtctgttccacttgacattttttagtcttattacaggaaaccaggcactgagtatataattatgttgttttctaaggaaagtcaacattctgtttatcgtaacctgaatttgcacaattcagtttctgaagtttcttgtgttttgaggttcccaagcttctccaaaccaatattctttttgagatttcaagagacagcaccctgtgaaatgttcatcagaaacacaccatgatctcctgtttccacacagggttggggcgtgagacacatcacatttgtggacaatgccaagatctcctactccaatcctgtgaggcagcctctctatgagtttgaagattgcctagggggtggtaagcccaaggctctggcagcagcggaccggctccagaaaatattccccggtgtggtatgttgttgcttttgcagaggttttctgttatatgtataaatgtttaagtcttgggaaatgaggcctgtggcattgaagaaagagagtcagatatctgtcactttctaccagccactcgctatgtggctgaacctctgtttcctcatctcagagagggataaaaaaacacaaccaggtcaggcatggtggctcatacctgcaatcccagtgtgtctggagttggttccttcagtgcgttcttggtcttgctgacttcaagaatgaagccgcggaccttcgcagtgagtgttacagctcttaaagatgatgtgtccagagtttgttccttcagatgtgtctggagtttcttccttccagtgggttcgtggggttccttccggtgggttcttggtcttgctgacttcaagaatgaagctgcagaccttcgcagtgagtgttacagctcttaaagatgatgtgtctggagtttgttccttcagatgtgtctggagtttggtgggttcatagtctcgctgactttaagaatgaagccacggacgttcgcatgttacagctcttaaaggtggtgtggacccaaagagtgagcagcagcaagatttattgtgaagaacaaaagaacaaagcttccacagcgtggaaggggacccaagtgggttgctgctgctggctggggtggccagtttttattccctgatttgtccccacccacgtcctactgattggtccatcttacagggtgctgattggtcagttttacagagtgttgattggtgcgtttacaaacctttagctagacacagagcgctgactgatgcctttttacagagttctgactggtgcatttacaatcctttagctagacatagagcgctgattggtatgtttttacagagtgctgattggtgcgtttacaatcctccagctagacacagtgctgactggtgagtttttacagagtgctgattggtgtgtttacaatcctctagctagacacagagcgctgattggtgtgtttttacagagtgctgattggtgcgtttacagtcctctagctagacacagagtgctgattggtgtgtttttacagagtgctgattggtgcatttacaatcctttagctagacacacagcgctgattggtgcgtttctacagagtgctgactggtgcatttacaatcctctagctagacagaaaagttctcccaagtccccactcaacccaggaagtccagctggtttcacctctcactagcactttgggaggctaaggcaggaggcttacttgagcccaggagtttgggaccagcctgggagacatagtgagaccctatctctttaaaataaaattagccaggtgtggtggtggtgtgcatctgtagtcccagctacactagtggctgaaacaaaaggattgcttgagcctaggtggtcaaggctgcagattttgagctgtgatcatgccatttcactcaagcctcggtgacaaggcaaaacactgtctatataataataataataataaataatccatctcacatattcttgtgaaaacgaaaggaatgtatgaataaatgttttgtaagttgcacagcattatgagtttaagttgaggaatttaggagtgtatatatttttatatcctgcctggttccaaagaggtttacagtggctcagatctaatgtgttatttttcctccatcaccaggatacttggtggttacttagtacaggtttatgaaattaaattgaatgcaagtcttcatgaagaagaaagattgggctgaaagtttagctttttgctctagctgcttctggtttttgagttatatcattagaaataccagataacaagagaaaagtcattcagctcctttcatttaaaatcttgacagttttctttttttaaggtcaaccagcaaatgatatcctgcctcttgaaaacttaatcattttatctgacaggagttagattaggtgtctccagagcatttgcttatacttaaagtgccagaagaggttctcagtcctaacaaaacaaacaaaaaaacccactttctcaaagtttctctctttagtcactttgtattagattcatccattttaaaaatctttgctttagaagcattgttaatgtttttgtccatttcactagagtccctgaggaacatcatcttgggtttaacagtattaattgaccacccactgtgtagccagctatgtgctaaatgctgaaaaaaataagaatacgttgcaaccctgtcattgaggaggcatattagttagatttctgctgtgacaatattgcatatcacacaatcccaaaatctcagtggcttacaattgcaaacatttatttcatgttcatgggtgtgcaggttggctgtggttcagctgtgtcactaggctgaacttactcaataagccacataacttcgagtcaggttccagtccattgtatgtgttattttcaaaatctaggctaaaggaggaacagtcatgtgggtcctactcttcctatggtggaaggtttaagcttaaaagggttggtgattattatgccttaaagtcttagctcaacagtggtacagtgcaatgtcttccatttctgttaccaaagcgagtcacaggaccaagcccaaagtcaatgacattagtcaatgtactcttcctggtaggaggtcttgcaaaggtcatgttgcaaagagtgaggatatataatattactagagggaggaggtgcctaattgggaagaataatccagtctaggctgcgcacagtggctgaagcttggaaacccagtgctttgggaggctgaagtgggaggagatcgcttaaggccagaagttcgagaccagcctgggcaacctagttgagaccctagcccaaaaaaaaaaaaaaaaaaaaaaaaagcagtgatccaatctatcgttggagagtattatgaactccctttaggacccagacagacctggctttgaacctgagctctgtcacttattagatgcctgaaatttttgtttactcaaatcctagtcattgtcagtgacccaatacaattcccccttcccactgtttatttgtttagttgctctattacttacttgcgtgtcaggtagtgtatttaagacctcccgtgttccagggacaggggaactagacagacatgtggagcttaaagtctagtgggggatggtcattaacaaataatttcacaaatacttatcattgtaatacatgcaggaagcaggagctcagttgccatgagaatatataacaggtaggcctgacctagatgaggggtggactgggaagacttgagaaaacaaacccctgaaggatgagtgggagttagctagattgagggtagcagagctgtctgtgcaaatgcctgaggtaggatgagtgtggtacttttgtggaactgaaagaaaaccagggtggctgcaacatagaggtcaaagaagatgaggaggaagagaaggctgaggtgggagcaagggacgccatgctgggcctgagagagcaagtccaactgttcttggaaacagccccctggcatcgagcctcttccttcacacttacattgtgttactctgttttccctgttggactattaagtcccccaggccacggtccaagtcttttatacttttatccttcatgccttataaataataggagataatatacacaacccatcaaagtactggtgtaattcatcacgttcatgaaaaatacttgcgaaactatttaacttattggttagccagccttaaggggctttccttatatgcttgatttagtatagtttctttttttttttttattatactttaagttctagggtacatgtgcacaacatgcaggtttgttacatatgtatacatgtgccatgttggtgtgctgcacccatcaactcatcatttacattaggtatatatcctaatgctatccctcccccctccctccacgccacgacaggcacttgtgtgtgatgttccccatcctgtgtccaagtgtgctcattgttcaattcccacatatgagtgagaacacgcggtgtttggttttctgtctttgtgataatttgctcagaatgatgatttccagcttcatccatgtccctacaaaggacatgaactcatccttctttatggttgcatagtattccatggtgtatatgtgccacattttcttaatccagtctatcattgatggacatttgggttggttccaagtctttgctattgtgaatagtgccgcaataaacatatgtgtgcatgtgtctttatagcagcatgatttataattctttgggtatatacccagtaatgggatggttgggtcaaatagtatttctagttctagatccttgagtaatcgccacactgtcttgcacaatggttaaactagtttacagtcccaccaacagtgtaaaagtgttcctatttttccacatcctctccagcacctgttgtttcctgactttttaatgatcaccattctaacttgtgttagatggtatctcactggatttagtatagtttcttcattcaacagatacttattcatcaccttccttctaccaggccacggagaaaaggcttgacctaagtaaacaagacatggttctgccctcatagagcttatattttattgaattataattgaaatactaaatgctaaaagggataagtagacattgctcaggaaatatagaagagcaggacctggacaagtgtggggcatgtgccagggaaagccttcttaaggaagtaacatttggtccaagctctgaaggaattgatcagaagaggtcttgaggagggaggcaaggaccagagagtggtgggaaaggccagtggccaggaggagcattccagggaagaaaattggccttttgaaggtaagaactgtgttaaatgcagacttcctagatatttggttacctggaaaagttagaaagattggttttattaatgcaagattatctaatttggggtattccttacttgttaagttattgcaagattctaatctcagtgcttgaagtcgagtgacatttgacttggaaaagaaaaaaataatgggtgatagcccctttaaaaatgtttaaattttgggccgggcacagtggctgatgcctataatcccagcactttgggaggctgaggcgggtggatcacgaggtcaagagatcgagaccatcctggccaacatggtgaaaccctgtctctactactaaaaatacaaaaattagctgagtgtggtggcgtgcacctgtagtcccagctactcaggaggctgaggcaggagaatcatttgaactgagaggcggaggttgcagtaagctgagattgcaccactgcactccagcctggcgacagagtgagactctgtctcaaaaaagaaaaaagaaaaagtttaaattttgaaatagtaaattcataggaaatgatttgatttggatgtttgtcctctccaaatctcatgttgaattgtgatcctcactgttggaggtggggcctggtgggaggtgtttgggtcatggaggtggatccctcatgaatggcttggtgccctctccacattaatgagtgagttctcgacctcttagttcacgtgagcgagagctagttgtttgaaagagcctggcatctctctttttccctcccttgccatgtgatgcatctgatcccccttcacctttcaccatgagtggaagcttccctcatcagaagcagatgccagcactgtacttctcatacaacctggagaaccataagccaaataaacctcttttcatttaattgcttcaaatattcctttatagcagtgtgaaatggactaacacaggaaatacaaagaagtgtaccaggaggtcatgagcaccctttaccctgcttcttctgggtgacagacttcaaggacagggtggtttcactgggtagctggcctgaaaagccttaaacactccctcagaactagagagtttgacatttgttttttgctctaaaatatatgtatcccagactaaccgtattctggccccagaccttccagtatgtcaaatgtcagctcataagaaacccttgcattttatctgcatggtattctttcactaattccttctcttctactccaggacataggtgtcatattgaccctttccaggtgcctttaaaaaagctatgataaaattacatgaaaagaagcgctctgctacagataccacacctgatcctggggaagagtaaattgaataagaaaacaactgatcttttataaatcatatagctatttgaggcaataagatgtcagattatgaggccgggcgcaattgctcacgcctgtaatcccagtgctttgggaggctgaggcgggtggatcacgaagtcaagagattgagatccatcctggccaacatggtgaaaccccgtctctactaaaaatacaaaaattagctgggcgtggtggcgcacacctgtactctcagctacttgggaggctgaggcaggagaatcgcttgaacccggaagtcagaggttgcagtgagccgagatcacgccactgcactccagtctggtcacagagtgagactccatctcaccaaaaaaaaaaaaaaaaaaaaaaaaagatgttggattatggagccacacttgaggttttaaaacccaaatctggacatctgcttcaaccctaatgagtagtggatactggactagctctgccaccataaacaattacacgctgggacaaaatacgtaaaattactcttttcagacagtgaacagtaggtagtgaaagactatggtcataggtagtgaaagactgtggtcccagacagagggaaggaaagatttgtcccagcttataacatgaaggcactttctggcccatgccatagcccgtgagagcccagggagattctcttggtctcagtgagctgaggaaacaaccagaattcagagcagctgaggtggctggaatttgcaggacgtagtaccagaaatgagggagctgtgcacaggagtgcctcggtagcaccttgagtctttgactgaatagcgagctgtgtgtactcacagcacgactctcgtcagaccaggcaaaaacacactaccagagagctatgagcagaatggagattccagagttcacacgagctgggagacactggagttctgtatacggagtggagagacctcattgaatactctgagcccttatgtgatacccagaatggcccctataaagtttcgaggggaaagcatcttagtggtcttgtgataaagatttcttaggacctagtaaatactatgaacaaaaaatggtaacttagttgactttataaaaatttaaaacttctgcttctcaaaagatgcctttcaaagaagggaaaaactagccaaactgagaagacatgtgcagtcctcttatccagaacacgcaagatgaacaactcctaccactcaagacacacaaagcaacttgtttttaagggggaaaaaagcttgaacaggtacttaatttatggtgaagatctatgaatggccattgaacacgtgaaaatgctcaacgtcaatagtcatcagggaaatacaagttaaaaccagagagatatatcactatacacctactaaaatggctaagattaagaagcctgacaatgctaaatgttgtcagggtgtggagcaaccaaaacacttatacattgctggtaaaataactactttggaaatctggctgtttctcatgaaatttaacatatgcctaccttgtgacccagaaattgtacctttagatctttacctaagagaaatgaaaacatatatacatgaaaatacttatacaaaagtgtccatagcacctttattcaaaacagcccaaatcaccatcaacaagagaatcgataaattgtagtataattataccacgaatggaatgtattattgatacttaacaatataatgaacctcaaaagcagtatgctaagcaaaagaagccaaacacaaacaagtatataccctagcatatcatttatgtgatatgttctagaatagtctaatctatggcttatgaagtcagatcagttgtcatctgggggcaagtggggaccgactgagggggagcacaagaccatgttctggcgtcatgaaaatgttctatatcttgatagctgtatgcagtggttaatctatcatttgtcagaatacattgaactgtgcatatgagatctgtgtatttcactttatgtaaattatacctcaacttggctacacctttgaatcatcaggggagttttagaaaatattggtgcctgggctcattcttagagatttccatttaaatggtctggggaaaagcctggccattaaactctctaggtggttctgatatacagccaagtagaaaaccactgtgttgaaagttgctgaattccagcctcttgggtgtggacataactgatgggctctaacgttagcttactggctgaaattttagcaagtagagatttatttaggttagcaaagttattttattattcaaaagttcagaattggtattgcatgattatacttccatcttggtgtcatgaaaatatatacttaatagttatttggatcaagctaccaccatttaacatgctttgtcaattgtagtatgtcagtaaggtattgcaggtattattattactgtagttgttgcttttattattgcttattacggcatttggtacatagtaggtgcacaatacttaatggattaattaatgagatcctgatagctgtgctagtctcattattaaaatagatgtgtgctgtgctagtctcattattaaaatagatgtgtttttgcacctttcttcttcctgaaatcctttctgcctcaggtcctttcctgctttgcttgccactcttttttacattccttttgaaattgttgttcttcctttcttgaattccagagattaggtttaaagttgaagataataaaaaaaatccacaatctacaaatttgatatttctttgtaaaaagatctgcttgctgtgtcccttgagctatttttccagtaggtgaggggttttggcaaatgagtgaaaaagctgatgttttcaaacacttccctatggccagtgatatacaggggttaaaggtacagtttatgattctagaacacattttttgtggaaagtcagtgtccctggcttcattagcacccatatgtgactcactgttaatgtgccaaaatattatgtggtcatcaaggggcagatggtaaattataaagctgttctaaagcccatataaaaaatcccaattcaggggaactcaggttgatggacagcttctacttttggacagagagtgaagccttactctgtcccacactctgacatcacccaccataactcctgccccgataaaaatatctacatactcctaagtagattttttggctctaagttagcaagtagagttttttgtatttgaggttttttaaaatgcatatacccctgaaaggattaagacaagatcatcagtcattgtaaccttatgtgaatgtattaaatcaaattatatttgctagaacactccatatggagatgtttaacactgaggaaacagaagggagggcaatttggaagcaaataggaagagatagcccagttggaaagaggtactttggcagggtacggtggctcatgcctgtaattccagcactttggaggccgaatcaggaggattccttgagccaaggagttcgagagcagcctgggcaacatagtgagacctatctctactaaaaattaaaaaatcagccaggtgtggtgacgtgtgcctgtagtcccagctacttgggaagctgaggtgggaggatcccttgagcccaagaggtcatggtttccgtgagctatgattgtgctagtgccctctagcctgggtgacaaagtaagaccttgtctcaaaaaaaaaaaaaaagaaaagaaaagaaaaaaaaagaggtacttgggtaggcagaaggtgctgtgataaagtttcttggccttggatggctggaaagagccaaagatacacagttttctccagtgtccttacctcaggtaggatgtgccccctccactttggaactgagatccgtatgtctctgtttgctgccctgccctgcctcagggccctggggtgataggtcaaggtgttctaggatgcagaggtgaagaagagagagggcgtgggaagggtgcagcataatagtgcacagggagctctcatgtatgtgaacacaagtaagtgcaggcagctgtgggaagtgtgggctctgagatattacctataccattgctccagacataactacgtcctggtgtttccctagaatgccagaggattcaacatgagcatacctatgcctgggcatccagtgaacttctccagtgtcactctggagcaagcccgcagagatgtggagcaactggagcagctcatcgaaagccatgatgtcgtcttcctattgatggacaccagggagagccggtggcttcctgccgtcattgctgcaagcaagagaaaggtaggccctgtctctaattatgatttatgatttaatgcaccaccactccagagggaggagtgtccctaaccttcccttccccagggcagagatgtggtttgtgtgacctggtagcatagtgccaaagggcttctgcttcagactctgtctttgcctcgcacaccatcacccaatgtaataagtaccatttactgcttaattttcataataatcttttgagatactctacactgaaagatatactgtacttacattaaaacgtaagctccaagaggacagagacttggtcttattcaccactacttggtcaatgacaacttcaaggggcaacaatgttgaatagtgaactaaatcatggtgcatacctatgatggaatagtatgcagccattcacagttatgttttcaaaggactttaataagatagaaaatgccacattatattaaataaggaagatacaatattgtatatattttataccaattatgtttatatataaacattgatatgtattttcttaagtatctacttatctgtctattgagagaggagaaagaggacaagaagaagggagaaagagagggagagtatgggagagaaagggagaaaatagtaggtaaaaaatacaccaaactattaatagtaattttttgagctgcgggttgtgagtgatttttgttttcttttgtagtgtgtttattcttatttttcaaactttctatataatcagatatttgggataataagttaaattagaactatgaaaagttgttatagtataatgaaaaaacggtttcttaaaaatttatgtgttgggctggacatggtggctcacatctgtatcctagcactttgggaggattgcttgacccaggagtttgagactagcctgggcaacatggtgagactctctctctagaagaaaaacaaaaaattagctaggtgtggtgatgcacacccgtgctcccagctactcaggagggtgaggcaggaagatcacttgagcctgggaggttgaggctgcagtgaaccgagatcacgccattgcattccagcctgggcaacggagtgagatcctgtctcaaaaaaaccccaaagaaacaaaaaaacaaaaaaaaaccaactatgcggagccaggcatggtggcatgtgcctgtaattccagctactgggataccaaaaaaattctatgtgaagggtgaattatatggtatgtgagttatatctcaataaagctgttataaaaacaaatctatgtgaacatgacagtatagcataatggtggaaagaatgtgtttgagaactatgtagacttggttttatatacctacctcttgccagataagtgaccttgggcaagttatagaactaacttctctgactttcagtatcctcatctataaataagaaatgtttgttatgagtttttttgtttgcttttttctttttcagagatagaatcttgctctgtcacccaggctggagtgcagtggcggaatctcggctcactgcaaactccatctcccaggttcaagcatttctcatgcctctgcctcctgagtagctgcgactactggcgcaagccatcatgctcggctaattttttgtatttttaatagagacagggtttcgtcatgttgccaggctggtctcgaactcctgacctcagacagtctgcccgccttggcctcccaaagtgctgggattacaggttatgagccactatacctggtctgttatgagtttcaaatgaaattaaatgagataatttatgttcatcacttatcaagtcttttgtaattaataagccctcagtagtgggtagattttatcatcattagcttttataatctaattacacttacatgcaaaaaataaattttaaaaagttgagcaaatatggaattagccacagcttgaaatatatgtgtcttttaactctgctctttcattccttgaaacctgcagctggtcatcaatgctgctttgggatttgacacatttgttgtcatgagacatggtctgaagaaaccaaagcagcaaggagctggggacttgtgtccaaaccaccctgtggcatctgctgacctcctgggctcatcgctttttgccaacatccctggttacaagcttggctgctacttctgcaatgatgtggtggccccaggagatgtaagtggatttctctatagttccaaatatttcctatcaccaacttgtacactgaggcagaccgacttggccctttcatttatgactatttaaatattatcttttaacaaagagaagaattctccaatttggggaggatggcattatctcattatgaaccttgactggcgtcatcaactgtacacctgttccttgttcaccaatataaacgcggctacaaaccatatttttggaaagcttattgaggaaaccacagcagactagtccctgatagcactccgtattgtctccggtgcttctcttagtcaagataacattacaaatcaggagtctaaagaccagattccatcaatggcttgacactgcctcccaggtagttctaaaaagtctcttaggttccctctacctttgcaaaataggagtgatgtgtaggcttgtcagatttagtaagtaaaaatataggattcccagctaactttgaatttcagttaataatgaattcttttttttttttttttgagacagagtttcgccctgtcacccaggctcgagtgcagtggcacaatctcggctccctgcaacctctgcctcctgggttcaagtgattctcctgcctcagcctcctgagtagctgagattacaggtgtgtgccaccatgcccagctaatttttgtatttttagtagagacggggtttcaccatgttggtctggctggtctcgaactcctgacctcgtgatccacctgcctcagtctcccaaagtgctgggattacaggtgtgagccaccacgcttagccaataatgaataattttttggtatatgtcccatgcaatattcaagacccacttatactaaaaatttatttatctgaaattcaaatttaactgagtgtcttgtattctccctagcaatgctaatagaggagggaagaatacctgccctgtcaactcacagtgcaaagtgggtcaagtgcgacagtgctttgaacagcaagactacactgtacaaattaagattctatgactttcagaactccacacaagtcagtctgtatgtaggtctgttcctttatcagaacagataacgatttccagtgaaacaatgcagagatgttttctgtaacctcccctctatttttcctttgttttaaaacttttcccttaataactcatatctcttttggatgactggcttttatgccctcccaatataaagaaaagaagatgaccattctcttttatggagaaagatggcttgatgatctctgttatggtgttataatatatagctggtcttgttatttagtgattgtcaacaaatacgattagtggtcccttgcagtaaagtcccatctgctcataaggtaaaatttttatagagtcaaaaatatctctaacaacctcttaatttgcccagagttggatggttagactctctttggttgaaccagcaaaggcttgtgcttagagccatgttgtagaaaaaaaaaatacttgtagtaaaccctagaatcacacagagaggtgatgcccatgttgtgagaggcacataggaactgagggccgcaggaatagtaaattgttgctcccatctcacggtcactttgaggtgttagctcagttaaaatggcagggcagaatcatttgcacttttcaaatcattgttcctttctgtgtctctgtcacttaactaccaagcacagtagaactgaattgagtcacttaaaggaacacatgatgcagttccattatatgaggcagctaagccctcatttttggttaatatcccccaatctgtttaggctactgatcctttttagcatatcacctcatttagttacctaaattgtatattttgtttatcttgataatctcaagaaatgatgtacttgaggctggatgttctttgccaacaatgagcatctggttataatttaaagctttgtcacagaggatttcatacttgagacagctagagttgaatggagtagaacgttctgcacacaccaatgattgtttctttgcagtcaaccagagaccggaccttggaccagcagtgcactgtgagtcgtccaggactggccgtgattgcaggagccctggccgtggaattgatggtatctgttttgcagcatccagaagggtgagtttgctagtaggagatgagtatttaaacaaagcttttgtaggcagttgttcatcagtgtctcccatggccttttctcagtctgactttacagagaatttcactatttcaccctcaaaaaaacaagactagaaaaagcaggtctggttctttgggctgagataacttggcatgtttcctttgtggccacatttctgcatctttccggacaaagtcactatggtttattttatttttccaacgcttatatagggcttactttgtgctaggcactgttctaagcaccttagaaattttgcctccttcaatctttttttttttttttaacgagacggaatttcgctcttgttgcccaggctggagtgtaatggcacgattttggctcactgcaacctctgccttctaggttcaagtgattctcctgcctcagcctcccaagtagctggaattacaggcatacgccaccatgcccggctgatttttgtatttttagtagagatggggttttgccatgttggtcaggctagtcttgaacctctgacctcagtgatcagaagtgattcacccaccttatcctcccaaagtgttgggattacaggcgtgagccattgcacccggcctcctttaatcttcatagcaaacatattaggaaagaactattattattagtcgcagttttgatggggaaatcaaggcatagtgaggataagtaagtggccaaatttacatagtaaatggaaaagccagggtttagctcaaccagtgtggctccagactatgtttaatgactttgttatgctgtttgcaatacaggcagcagaaaatcgaatttttgaaagatttatttttccagttctcagaaagtcaatatgcaaattaacatgaatattctatttcttgtgtgactcaaagctttcctcagcagttgaaaattgtggttgtatatgtaactagtatgggtactctgagataaatgaaaagcggggcttttttgtcttcctctttgtcatccaccttagctatctgtcatttaagtttattgccactctctgacaggaagtatttgggataaaatctttgagagctgactttatgcttccttgacactgagcctctgtctgccacatttgccctggtcatagtttaaacaccaggtcctgtgtcacatctttttggtgccacaagtatcactccattgttcagagagtagtgtattagttctgcccaattcattcttcacttttatttcttccatttcattagcatttatatcagctcaagaagttaaggttagaaaattttccacttcaaattttcagtacagaaatgtgctgtgatgtttgacaagactatttcatagtaagtgagttaatgtttattggcctctgatatgccgaacattgcactcggcagttgatgtagtagattcctcatttattaatcagagctccctcattcctactttatagatgatggatctgaagcacagaaaagttaagcaacttgcctatggtcacaagctcaggtctttctgactccaaaccatgcatgtttaaattactcttcttgccctttgtcccagggaaattagttttttgctaacttacactgcccagcaaggggcattttagttatccttatgaatcttatgtagatttctgctagatcatcctcccatgtgttaaacttggattaaatgagcagctctgattgtttcctgtcctcaggggctatgccattgccagcagcagtgacgatcggatgaatgagcctccaacctctcttgggcttgtgcctcaccaggttagtgatgtggaagtgaaatcacaattcttttggtacagggggaaagcatgtggggtctctttgccattccatctgcccagcccacttcatatccaccctacttaccctgcagctgggatttcaatgggagagctttctgaccacctggaaggtattccattctgcgggatagtgatgggaggaaatcacgaacgagaagcattgcccagagtctttgatgcgttttgtaaactgactagaggcctcataatgcaataggaacagaaaaaacaggctttggaatcagtcatacaatggtttaaatcccagccctgccgttataaagatggccttctttggccaagtcactaaacttctctgaggcttagttttcttatctgtaacatagagaaggtaatgctgacatcacctggtagttgtatggattatggatggttgctagaaagggctcagcaacagtgtatatcataggccctcaacaaacaatgcctgctgtttctttactgttgcttgttattattattgactctgaacccaaatagaaaacctttataggcaggcatgagaaaaacattagaagcatgcagggtcaccaaaaagtggggtgtcttttcagaaaaagaatccaaagcatcatgaggaagttccatcccttagggagtaaaaagaaaaaggcagtgggatgatcttttagaattcatgttgcctcttcagtcattttcattactatatttttgggagattgaagaggttttccagtcttatttggaaatcatttttttttagattccatgtatgtatcctctcctgtaatgtgactgctgttcccatcagtgaaatcgtgatggtgcccaccagtcctatctggtgatttgcaaggacagactcagacgagtgcagagagcagagtgactcagctcatgcttgtctctctcttcctcctcgccacccaccttctgccagctagggcggcactgtcatattcagtttaggatgagaatcagaagaggggaaacgacttcttcatggtcacagagacttagtggatgagccacaatccatacctaaacttggcagtctgacaaatgttctttcaaaggtcttgtgagttgaaagatccgtggcctgcatgttgggagattttgcttcctgttggtaccccagcccccttgcacaaaaccacccataatagaacttgtgggccgggcgcggtgactcatgcctgtaattccagcactttgggaggccgaggcgggtggatcacgaggagaggagtttgagaccagcctgaccaacatggtgaaaccccgtctctactaaaaatacaaaaattagctgagcgtgatagtgtgcacctgtaatcccagctactcaggaggctgaggcaggagaatcgcttgaacccgggaggtggagggttgcagtgagctaagatcgcgccattgcactgtggcctgggcgacagagtgagactccatctcaaaaaaaaaaaaaaaaaaaatagaacttgtagagttcacttagcctcccagagtctcagtttccaaatcaagaaaagcaggtgctttactttgtgtccaggattacatctgacacggccttgaaaaccacaaaacactatgaaaatgtgcccccctctgtcccccacacacaaggtggcatttttttttgacatgcatgtgttaatcttttctacagagacatttcacgtaggacccaaaagacgcggtaataaccatctatcataaggaagctgatctccagagcctacctctgctatttatgctgtcgtatctcatttgaatctttcccaagtctcccgccttcttctgaccttgagatgtgccctcatctcctttacagactttatattgagaagggccttaattaaattttcagtcatgcccctgcactggtttccttctttaagtcctttatgttaaattactgcagttgtagttttctcagtgctgaggccagagggcaaaacagtctctttatagaaggggcccagtgtcaaaatgcatgtgcccatgtttttaaagtactatggcaactaatccctctcggtgttatttatccccattgagcctcagaattatttgtcattcaccaactcttctagttctttctcctcgttttcaaatgtctgaaggattattttggttgttggccatctcttcatttgcccttttcaaagactgaagaataacgcagccatatatgggaaaagctgtgtgtgtgtgtgtgtgtgtgtgtgtgtgtgtgtgtgtgtgtttacttgcttacattgtttcaagtttcaagcctttatttttagctactttctaagaaagaaagtggagaaagaactttaaaaattaatcagggttgtgtggtccccatgtataggctttaaacaacttttttccccctaagtggagtgagtccatttatgcaaccatgttttgattaggggaccatcgtttccacgtttccacaaaaacactgggctgtgttgcaatgccctgttgcaaactcagcacttccctcctcctcttcctggctcctagagacaaatgatttcctgttggagaggaacttggtaaactcctttgtgtactttgtatgcaaagaagaccagtgaagtttactgggctcatttttctcagttcccaagaggagaagttttattaattggcccctgtggaagagatgtagtagaaaagtgatagtccttggactgagaatcacaaggccccccaccagcaactcattgtgtaatttggagaaagttccttaacttttcctgtgctctctgggtctctgctctcctctgtgtcagacctaggaggcctgaggattacttagttgttctgtctctgggtccacaggcagaatttggcccatccaaagactggccaagtgccaaaaaaaggcctgattaggccctgaaattcagtgaaattctgcctgaagaaacctcttattgaatttgaaaaccataaaccatttcaggtgagcttatgggtttgttttgggtttttttttttttttttaagtctctggcccaatgtacgtggattagattctgcaagcaggcagcagtaagtataagctaatttctgtctataaaaagaatgattaaaaaaaatcattttgttgatgtgtggaatagagattatcacacacatcattaagtggtaatgtgatgaatgatcacaaaacgaacagtcttatacccagcacacagatcagaacaaagtaactatcaagcaccttcaatgcccccctcatgcctcttcggattattattgcatccttcctatagagaggtaagcacctcttgattatcagcaccatgggagatgtttgtctgattttgaacttctgtaaatgaaatcatatagtatatactctttggaatctgttgtcttttgtagagggaactttttcattataaatcttatagtagtgttgttccttcttcccatcaacagtgttcttttacttaaaaaaaaaaaaaaaaaaaaaaagaagaagaagaagaaggaaagaaacactgctttttccctcccggctggtggctgagctctgcaaggccagatcctttttctggttctttggtaggaggcacagttcaggatttataaaatgtacaggccactcttgatatctccaggaagttggtttgccggctggcaagagatcctggatgtgacagaaattaacagcctgttggcctgctaattctttggctgtacctcctcaaaggatgataatgaggtgacaaggctaggcacagtggctcacccctgtaatcccagcactttgggaggctgaggtgggagaattgcttgagcccaggggttcaagaccagcctgagtaacatagggagaccccgtctctacaaaaaattagccaggtgtggtggcacgcacctgtgggagtttgaggctgcagtgagccagtatcacactactgcattccagcctgggtaagagagggagtccctgtctcaaaaaaaaaaaaaaaggaatcaaggtgacgctacaacagttgtccaaacaccaaggtaattgatggggcattcctgctttatcccacttgtggaccaagcagttcacatcttttgtctttaggtgaatgaactcttggttctaaagtactgataaaaaaagaccctgaatgtgtatatgccattcttctgagcttggaattgccaaccccagggttttctcagcttcatgaattcttttagcttcagaaaagtaatacaaagccaaaactagggcaggaccctgggagggacctggcctgggaaaactctaattgagtcacatgctgaggtggagctgggatctctagccatatctcgggatatttggcctttctgcacaggctgtgtcccccaaatcctcaagcctttagattttgaaaaaatctctttactgtgttcagaaatacttatctcagtgtgctcctagggacatggacagatggactgctgaggagggaaatcttagcagataagcaataagagcatatttcctgagatgcagcccaggaaaggagcctcctttacccctctggttctaaacctctctggttgatgatgatggatatagcagaaaaaatgggcaggcctcatgtttcactatatcaagtgctatcgtttgtgacctgttcatcttatttccctccctccagccatcccctcaacaggtaatctgactctgccaagtgccaagcactatgaagttcagggaagttaagtaactggcacaagatcacccagtgttgagttccatttgcgtttggggtaatctaaggtgatggatgtatcccaagccatttggatgtagtagagtctggttccagtggggaggcctctgaatacaaggaaggatccgggtataggtctaacaatgtctgggcttcctctgtgaggtcccagaagaagagtcaagattgctgtttccctggaggataaattataatgtcagcgttcagaagcatctcagattgcatctcttgtcccaggaggagttgggcctaaccttacaggttgaaggatgtcactttgccccatgagttttacccactggatgaggctgtcctgtttaggaggtgcgtgtttaggaaggcagcctgaaggttttgtgatcatacagatctgattagaaccccagctttgtctgttaatttcacattcagtatctcattttacaaaaccagttggggcagctcttagcacttgtccctgtttgaccttgggcacgttacgtatcttctctgaacctcatgttttatatctgtaaaatggggataatataataagctcttggaattcatggatggattaagtcacacgtactaagcattagcacagttctgggcacataagagacccttgtaaatatcggtttcatctttcacttttaattaaaatggaaacttatccactctcctaaaaaggaatttataaagactctcataaagctctgaaagcaatgagtagagagggagtggttgggaagatttgctccattctgcagtgtttttctaaggataacactggctcatgtccagcttagtttttctgcccccttggtgactctagcttaatagcgagagttgggtcagtggtgggagctgaagctcttagctgaaacaaagaccattctggtgtgcttagggttttgcaattgctacactctccattttggcattgaacttgattaagactcttttcagcatccaagatcgatctggagtttggagttagtttttatttatgcgaactccaagctttagaaatattgccaggcctgctggaagctagtgtgaagttaaagcagcaagttccagttgtggctgcaactgtgctttctcagaatggctgtttgttgctgggcattggatcttagcctcccatcgaggcctgggtctgaagctaattttactcagcttaggtgaaaacaccaccaggggtgggtggcccagaaagaaagaggaacctttctattcttgatctatttattttgtggccaactgggcataattgactaaagataattgaatccacctgataggtgttaagccctctaggtgttgagtttttgttcgggagttttgttttttttttaattcctctagcctctttcttcctttctacctctttgcttttcagctttattcctcaggctttagagccagaaagaacaaaattcagattcctggctttgccacttggtagctgtggacccttgggcaagccatgtcactttcctgagcctcctatgttcctatttggagatctgtgccacaagatggtagtgaggccaaaatgagatgcaatgtatgaaaacacccaggagccctgaacacaggcatggaattcagtaaattttagtgctctcctccctccattctctggggtatcattttccacattattcaaggacatgccttcctgcctggcttctaggattaggagggaacatttgtttatttgaaagggaaaaggaagagaagtaagtgctttagcagggggacgtagaacaggcagaaacaatggctgggaaaggtgctcagcgagtttgaggaagggaaaggccagtttacctgcgagacagcgagtaaaggggcacagcggagaaggcaggaatgcaggggccattggaaatgcctggaccttcaacccggggccctgggaggccgttgaacgctgaggtgtgatatgagtagatttggttgctgcatggagaatagactggaggtgatacgagtggctctgggaataggatttgagtcgtttggtcttaaatcagaagacagcctaatccagggattcccatacctggccttccatcagaatcacctaaggagccatttcaaaatacccatttcccagcccatcccagagccactgagcgaaaacctccagggacattaggcatttgagaaccactgcttctgtccatgaaaacatggcttcttgatagcatcacctgggacaaagtacttaagtccttaaggtagcacaccaaatcctgctttttgaattttgtgcttccaccaacactagttgtgtttctaaaagacccttggcaccttgttcccagtgcacatctgcagccccaacaggtgttcctgcctgagagcctttggaagctaattagacacgcacaggtgtgcctaatgaattcctgccggaccacacgctgtccagctgggaacagcccgggagcgaggccaaacaaccatataaagcgaggccaaacgacctattctgatgctttttgcatgctgtctgccgtgttttcattccccacggtgaggacggtgtgtcctgtctcctaaggccctgtgagccaagctcagctacaacctggtgccccacatctgacaacagggatttccactcaaagtgcttggcccttttgggcctgggggtgatgagtgggactggagccaagaaaccacaggtaattgggattcttctaggctctgtgattcccaggtgggttttttaatattcagggagtagcaaagatacaaatattgtagagctagtttaggcgtacaattttttttttctagacgtttctatggaacactaatgttggtgattattttgcagggagagggaatggaggtaacagggacttagggttttcatttcgtacttttctgcagtgttttgaaaaattaagattataagccttttttaaaatcacctttttcaagacataactgatatatagtaaaatgaacccattttagtatgatttgacaagtgtatacactcacataactatcacttccacaaatgagatacagaatttttctgtcaccccaaaaagctcctttgtgccttctcccagttcatctccccaccctcagccccaggcaaccaccaacccaatttctatatggaccatttttattttttctgtatattttactgtactaagggaaaaaaaatgtaatggaaatcttaaaatgttcagagggaggcaaggtttggtcactctgaggaatccctcttactagctacaaagttggtaggtaagggctgggtgtgtgtgtgtgtgcgcgcgtgtgcgtgtgtgtgcgtgcgtgcgtgtgcgtgtgtgtgtgtgaaatcggccatgttttccccttgtggggagaggggagaatgagaaaacaatattcaggtgaggctgtttaaaagaaagttaaatgtttagataattttttaaaaaataggaaaatggaagtaaatatgtcatgggagtatgggttattgttttgtttgttttgtcatgtgtttatcgtttttattacagaaagagttaactttttttttgaaaagctgtttaatgcttaccctactataaggagaaactgacaacaaataggagaacaagagttgagagtaagctgtgtgagacttacgttatgactaactccaaaaggtagaaaatttactttcagcaagaggctttagtttcctgtgtggatggcaaaacacctttgatatcactttataaagccttttaatttaaatgttaatttaacatgaactaaattaggtggtgtggtggtactatttttagaaaatgcgcaaagaattagaggcttgctaagtgcttccatccgttttctgacagctaacaggtgatgctgagtggtacagagcaaaccacgggagggtgtaactaaggttagtaacaaagcatcctgtttcccttgcttgcctgatgggaaccacctggagctcttgttaaacctgcagattctcaggcctttccccagaccttttgaatcaagttccaggggcttcttctgatgaggcaagtttagaaaaacactgagcaacactttgctttatagactttgcacacttctaagtaggaaggtcacggtgaatttttctccacccaagcaaaggacaaatctttttaacttctttgggagttgcggcctggcctctctcaataggtatgtgtatatttattaggacctttgcataaggtacttggattttagattgctctggggtttctatgcatatgtaagtaaggtgcaacttctgctctttaaattttatgcagttcttataagattgaggaagtgcaatgcagagcatatgaatggtggcaagtcagagtttttcttgtggtttgtgtgggacctattttctctgtatagtccagatttgaataattttgtaagctttgggtttttgtttacttgtttattcatttcataatttattgtcttacgagcaaatcactgtgctatgagtaaatacaagtaaatacaagtagctcagcctgtgtcttgtcctctaaaagcaagaaagataaaaacatttcttaattatagtattcagactgatcctcaaattcatatggaagtgcaagggacccagaatacccaaaacgatcctggacgtgaagaacaaagttggaggactcatactttccagtttcaaacttagtacaaatctactgtaatcaagatagttaagtactcacatagagatagaaatatagatcaatggaaagaattgagaatccaaaaataaacccttaatggccaaccaatacagttcaattgggaaagaatgccgttttcaacaaatagtatggagacagcagcattccacatgcaaaagaatgaatttagacctttatttcataccatgttaaaaaattaactcaaaatagatcatagtcctaaatgtgagagctaaaactgtaaaattcctagaagaaaatatcataaatctttatgaacttggattagacaatggtttcttatgtaagataccaaaagaccaagcaatgtaagaaaaaatggtaagtaggactgcactaaaataaactgttgtgcttcaagaaagcacaaaaagtccatgtgtggtggctcacgcctgtaatcccagcactttgggagtccgaggcgggcagatcgtgaggtcaggagattgagaccatcctggttaacatggtgaaaccctgtctcgactaaaattcaaaaaattagccaggcgtggtggcgggtgcctgtagtcccagctactcgggaggctgaggcaggagaagggtgtgaacccaggaggcggagcttgcagtgagctgaaatcgctccactacactccagcctgggcaacagagctcaaaaaaaaaaaaaaaaaaaaaaaaaaaaagtctgggcatggtggctcatgcctgaaatcctaatgcttgggaggccaaggtgggaggatcgcttgagccctgagtccaagaccagcatgggcaacacagcgagacctcatctctcttaaaaaaaaaaaaaaaaatcaaaagaattagctgagtgtggtggtgtgttcctgtagtcccagctactggagaggctgaggatcgcttgagcccgggagttcaaggctagagtaagccgagatcacactgctgcactccagtttggagaacagagcaagacactctatcaaaacaaacaaatgaacaaaaaaaccagaatgggagaatatatttgcagatgatatatttgataagaaacctttatccagaatatgtaacaaacttacaatacagcaatttaaaaaatgtttaaaacttggcaaatgatttaaatagacatttctccaaaaaagatagacaagtggtcaagaagcacatggaaagatgcttgacattaccagtcattagagaaatgcaagtcacaaccatagttagataccatttcatactcactaggatggctataatctacaagagacaacaacaggtgttgacaaggacgtgaagaaattggagccctcacactttgctagtgagatttttttttccccttgcccccaagatggagccttgctctgtcatccaagctggagtgcagtggcacgatcgcagctcactgcaacctctgccttccggtttcaagcaattcttctgcctcagcctcccgaggagctgggattacaggcatgtaccacaacacctggctaatttttatatttttactagagatggggtttcaccatgtttgccaggctggtcttgaattcccgaccttgtgatccggccgcctcagcttcccaaagtgctgggattcaggcgtgagccactgcgcctggccaagattttaatatgatgtggtcactttggaaaacaagttggcagttcctcaaaatgttaaacagtcgtcatatgacccagtaattctactcctaggtatatttccaagagaaatgctcatctactgatgaattgctaaataaatgtattatagcaacacaattgaatattatttggcagtaaagaggaatgaaatgctgacatgtgatacaatgtggatgaaaatatgctaagtgaagccagtcatgtgtgatttcatttatagtaaataagcagaataggtaaaacaatagaagcagaaagtagattagtggttgccagtgtctgagagaggggagaatgaggactaattgctgggtttcttttgggggtgatgaaaatgttctgaaattagatagtgatgatggttgcaaaactgttcatatactaaaaaccactgagctgtacagtttaaaagatgaattttatggtatgtgaattatatctcaaacccgttatgaattttaaactccaaaactattcctcaaggtattttgggcataaagatcaaaaggatttcagagggtagagatactatttctagattgggtagtagattgagaatttgtgaatgaggtgtgtttgagctgagtggtttttaaggaaggtgaacacttagatatgtagctgtcaccaaaaggaagagttttgagtcacagaattcagcatgaggcaagctcaggaaatcaagaatatctttgggagggaagttgtagttcagcttagcagttgtacagagtctgtaaaaaaaaattcaatccaaaatttaattggaaaggtgggttgggcccagagcagagggaccttggagtgcaaggaattctctgccttatttattatttatattttatttttattttttgagacggagtcttgctctgtcacccaggctggagtgcagtggcaccatctcggctcactgcaagctccacctcccgggttcacgccattctcctgcctcagcctcccgagtagctgggactacaggtgccgactaccacgcccagctaatttttttgtatttttagtagagacggggtttcaccgtgttagccaggatggtcttgatctcctgacctcatcatccgccctcctcggcctcccaaagtgctgggattacaggcgtgagccaccgcgcccggccttgtctgccgccttttgtcagctatagggagtgggtaaaaaatgacaggcctcagagctgtgtattaggaaaactgacagctgagcctttgcattagctagaagggagggagcccacctgtggaagtacccccttaggagtctcttgcagtcggttgagaagaagggtttcctgtcttgaattatctaaaactggaattattttggttaaattgtgggccttctgatacaaacttggtgaatttgaaagtcctcacacacatattattctacttcattttctgggaaaataaatctgtttcctagtaaagaactgtctgggcctgctgaacggtggtgtgtggaccctcattcaaccaataccgtgcacggcatcttctttttcttctattcctcgccacctgtggtggtgttgttgtttttcttctctatttcctctctccctttctaccccaactggatctactttctccctgtccctcagctttacctgcccacctccaatgataagacagtatcagagaaaattaccagtatttgtgcaacataaagtaagtttgatgaaaaccatattagagaaaacagcatgcagaaacctttccatgaaacatagatggacacatgacttgtaggctgtgttaaaaaactttaatggaaaaatatgctaaatgtgatgaagttcttttctaagtaaacttaatataaaagtaattggggtatagaggagactcactgtgagtattctcaagcctgtaacttccagagctcgtgaagatttcagcattcccatttgtgacttgctattaaactcttttctgctattttgatgtctcctattttgacgtcctgaatagcaaacttatgaccctgattatgcctcaggtcatggattatgaaatggttaccacattcctgagatgttaggaactaaaaggttgtcatattttcatatgtttatgatgaggctatctaacttataccagttaccaattttttttttttttttttgagatggagtcttactctgtcactcaggctggatctcagctcactgcaacctctgcctcccaggatcaagtgattctcctgcctcagcctcccgaggagctgggattacatgggtgcaccaccacacccggctaattattttgtatttttagcagaggtgggggttttgccatgttgtccaggctggtctcaaactcctgacctcaggtgatctgcccgcctcagcctcccaaagtgctaggagtacagacgtgagccactgtgccctgccaaatttttaaaatgtctttatcaatatgctatgtgttttttaatgcaatccgagatcaagtgtttgatagaaatgataaattcgggctgggcgcggtggctcacgcccgtaaccccagcactttgggaggctgaggcaggcaggtcacctgaggccaggagttcaagatcagcctggacaacatggcaaaaccccatctctactaaaaatagaaaaaacttagctgggtgtggtggtgggcgcctgtaattccagctactcgggaggctgaggcaggagaatcacttgaacccaggaggcagaggttgcggtgagctgagatcacaccactgtactccagcctgggcgacagagtgagactccatctccaaaaaaaaaaaaaaaaaaaaaaaattgctgtaggcatgtttttccaggtttgatttttttccagagagaagtatgcacaaacagttaacactgttacagtgtgagcatcaggatggagttatccaaaactcaaaagaagcctttttctttaaatagtttgtcaaattgtttgtttttcggggggtgggggatttgagggagagggcatggtgttaataggatggctaaacggtggtggatcgggtcttctgttctgttcaagtgagagtgttaaagttgtgagaagacctagtgttgaagacaaacgctgtggtattctgagagggagggaagcagagaagctcaggccgggggcaggttcacatcaggaggtccatttttgagtcttggctccattacttactgtttacctgagccaagttgccattcttcctgagcctgaggtttttcaacataaaatggggaatttgaaaggtcaaataaattaattcataatatttgtgttgtctggtttattataaacgttgagtcctatggagagtttagagatgttaccattcatatttttatgatatatagaacagcttaaagctccccctttggtgtaagtatagtatatacaggtataatgttctgaataaattacttcagttatagtttgtgaaacctgattatagctgatactctggaaatgtaactcagttgtagtccagaattttatgctcaaggtggtgctgtttccccataaatctgatgatgttttacattttatctctatctgttccaaatcaagcaaataactggatatatgtctagggccatttcggccttccacagtcccccaagccatctttccttgtgagaccccacccaaaatcatgtcatagaaatgtgtatttaccccatattcactagaacacatgtgggagcttaagagttgagtataccagtggacctgttcaacattttggaagacatttgttaaaaaatactttagatactacagcttgctttttgtattttagagtcagtttgtttttaggtcagaaatatttgaaaagcttgtaagccctggctcctaatggaataaaggacctaatatagttcttctgcaaactgattacgttacaagggaaaatactcatttcgaacttatttttgctcataatctctttccgggccgccatattaatcatttcctacttgttgtcagaaaccagacgtgcatttcatagatgtggtcgttgtgtgtttgatgtgaattgttttgttttgtttgtttttagatccggggatttctttcacggtttgataatgtccttcccgtcagcctggcatttgacaaatgtacagcttgttcttccaaagtaagtcattttgtattggagggacttgtttttaaaagtgagcgggtcagcatttgaccgcagcctcaccagctggagcccttgaaaccaactaagggctttttgtgggggaagggtggggtctaaaccctcagaaaggactttgttttcatggatctgtattcattctcacagtggtttaaaaccagcctgagaaaatgtgtagggagactgagttaaaatatttcaactctgtatcaatacttgcatcatgctaattttgtcttgaatttgaactttactgctctttgttcctccccagagggttccctcctagccaggaccctcatagagcaattttttaaagcgttactctgagggtgaggcggccctggctatgcatcttctgcagatccacataattacaaagaaaaagtaaacagagattaggggcctggatggggagccactaaaagggccccttcagctttgatctttccagaagctctaaaaatagagctggtatgttagccatcgtaatgtgaaacggctgatatatctcaaaactacagtgatggcatctcgtgttttaataggctttcggataccatctgagtgatttttacatgcacactgtatgtgatagctgatttcctttcaagtgttcctttcagccttctgctgcccagcgacttgacctgggcttttaaggctcatgattgctgataagtaaagattttcatgttgaagtgctatacaaaataatgttggtgaccactaatccccaactgtggcttctcagttacaatttggaactatttttcgtgtagccttcgtctgtctgccactgtggaagaaagagaattctagggatgtatttctctattctgagttgacaagcttcctttgaaaactgtacttgggctatattttatgggaagcacaatcctgaccagtttctctaaaaattgaatgtagaattgacaagcaatgttgataaatttggttacgtttagatgctcaaaaattgagactaattattttctttttgcttccgaagtaaactaagcctgttttattatgcatcccaagtgcctatgttgagatttcaagcttagactttgtcagtagttacccatgagcccattctttctgtagtttcctttaagatatatctgctcaagccaggacctcaaggatgtctgcatgcacccccatcttcagaaatgcaagttttaggattgtatactacatctttagtggagcagattttttttttctttgaatggttgagctaactggtctcaaaataacttggcagtattaattttcatactgaaatcatttggcacaggtgccaggttttctatggctttatgttggtctggctagtcaatgaaataaagataattgggttctctaagtgaaatgcaaacactcattcattcttgttctatttctaattaaattagcctttcagatactgtttataaaagaatcacaagcataccatctaactgggcgttccttatactttaaaagagaatagcttagcatttttctttcacacttattgtaagcttttaattaaatataggtatcacttttttgttagcaaaattatttcctcttggtgatcattttgagagtcctgctttacataaacatgttggacgatttaatacaaactgacttggattttaacagctgtgctattcccatagcggtcacttttcatgtggtctgagtattaaatttcttttgtcctggaaaggttgcttcattggtgcacgtatttccttacagtagaaacgcagcatttacttacttggctaccttctttatttgcttaggagattgtcattctctattatctgcaaacccaacattaatactttaaaatgacaaatccaattacattttcatttctgtgtatttgaatttttcttaatgtatatttagtataatacatgttatacagagtcatgtcatagttgttgtttcaaaagattggggctaaaaattacttttaaaaatttatcctttgacattcatgaagtaattttttcctttggtagttttcagtatgtttcctcctccccaccaggatcaaggccatgcttgtgtcttgatttaaccacaaatagagacagactggggaagtagaataagtttctgctgaatagtgaagcacttgttcattatcttatttattaaaaacaaacaaagcaatacattatatacacatatatatagagagagagagtgcgagcacgcacgcacgcgagcgagagctttttatgtagcctgaggtggggaagaatacagtgctttgcttctaaagcaggaaagttggaacatttatccataaatcatttcttatcctatgtgatcttaggttggcacataacgaggtgaattgttccatcttaggggaaaaatattgaaggatggtggggagaggtgggtggtgaggagtcactttcattccagtttctacttattgtcttgcagaactttctaaacagatggtatttgtcaatgaaatttcaaaagaccttatttgacgtttatatgagttgctctttacttctacaaagaaattccaagctaactagagtattgtggtgttactaccagagggaaaagtataatttttaaaatcaatattcctgaaagaatttcctgtagtgcattaaattactttgttattgttagactttcacctaaatattttttggcagagtatttttgggtaactttctattgatataattttaagcttaacagaaacattggaagaatagtacaaggaactccggtatacactttacccacattcatccattgttaacattttgccccacgtatatttgctgtcgtcctccaatccctccttcttcccttcccctaccccatttttttcttgaaattttgagagtaagttggagacattctgatcctttaaaactgaatgcttcaatgtgaattccaaagaacaaagacattctcttacctaaacacaatatccttatcaaattcaggcaatttaatgtttgcacaatactattttctaatccacagtctgtgtattcaatgttgttgtttataccagttaatgttcattataggttttttccttccagaccaggatccagttgaggatcaaacattgcatttagttgtcgtgtctctggctcccttcaatctggaaaagttacttcatctttctttatctttcttaacttcagtgttttgatattttgccagttatttttgtagaatttccctccatgtggatttgtctgatgtttccctatgattcgattcaggttatgaatttttggtggaaataccaaagaagtgatgctgtctcctcatgtcaggagttatataatatattatatacctttcggtgatgctagttttcccttttccatatttctgactaccttctccaacagtgagaaacctgcaatctcggctcactgcaacctccgcctgcctcccaggttcaagcgattctcctgcctcagccccacaaatagctgggactacaggcacttgccaccatgcctggctaattttttgtatttttagtagagacagggtttcactccattggccaggctggtctctaactgctgacctcgtgatccgcccgcctcagcctcccaaagtgctgagattacaggcgtgagccaccgcatccagccgtatcctggatatatttactcacttgctgaagtctagaataatacaggaagtagtttcaaaattgctagcccatactactacagaaaataaacctagaaccttcagttcctatttgtgcatagttctttttttcctaggtaaaatttatatatggtgaaatgtatgaatcttaaaacaactccgtaagttttaacaaatgtatacacccatgtaacccacactcttcctatcaagatattagtgtttttccatcactccagaaagttcccaggtaccctttcccagtcaattctgggggaaggggaagtatgttgtatattatgactagtccttctctaaaaggagtaaagctaggcagcttcaggtgttctttgcaataataaccttgtttctggtacccagaagttgaccaaaaccttttttcagacctgcagagtcaggagcaggactgtgcaggaggagactgcgtgcagagtattcttgctcttgttgcacaattctattactcacaaccttcttgatagtgcaagaacagcctgttgtgaagaatcaggctccaaacttggtttgcataccatctgggacctgcgcagatgcagcaagatgtgcccagaaacctgatcttgagatttcagtgattagcaaccttaataatacactcattctggtgttgactatgcaataggttcttctgttgatgggttatgattaaactcctcaaagtgacttgctattagctttctgtgtgtatctgggcatatatcttgaagagtgatagggtaagggttaggtaggaataataaatgtcagctggtaaatcgtactttgttttggccttggttatagccagcctgtccatttatttttttgatattatataatcctacctaccttctatcatgttttcttgttacttatgaagcatgaaaggctaggcatggtggctcacacctgtaatcccagcactttgtgggggctgaggtgggcagatcacctgagcctaagagtttgagaccagcctgggtaacatggtgaaatcctgcctctacaaagaatacaaaaattggccaggtgtggtggcctatgcctgtagtcccagctacttggggggctgaggtgggaagatccttgagcccagaggttgagatcatgccatggcactatagcctgggcgacagagcaagactctgtcatgcccatgccccaaaacccccgccagaaagaagcatgaaataacaaaaagtcaacttagctgcttaaatagtgtttttgtttgtttgtttgtttgtttgtttgttttgggacggagtcttgctcacttgcgaggctggagtgcagtggcgtgatctcagctcattgcagcctccgcctcctgggttcaagtgattctcctgcctcagcctcctggggagctgggactacaggcgtgcgccaccacacccagctaatttttgtattttcagtagagacggggtttcaccatgttggccaggttggtctcaatctcttgaccttgtaatctgcccacctcgacctcccaaagtgctgggattacaggcgtgagccactgcgctcagccagctacttaaatgtttaagagaaacctctgtcccaaagcaacttgtcacctaaggactttgcaaatgcaccacttagaaaggcaaatcatagatttgaaaggaatggttaaactgttatctgttagcagacattcatttaattcaactgacatttgagtccctgctgtgtgccagagatacaaagatgattacaatagccactgtcttcaaggaacactgcctagagggtgagacagactcataagccaataatgatctgttcagttgtgaaatgccctacagcaaggtctgtcctcttgttacggcatcccaataccaattaattttgtaaatgtggaggactagggaaggccttgcagaggatgacttctgagttgatgttaaagggtcaagtaggagtttctagaaacacctaggggagagaacacaaggaattccaggcagtggagaattgcatgtataatagccagagacaacaaaacatggcagttatgaagttgtttagtagagcagttgtggctgagcctgggacacccaattttctacaaatcgtcctcttgtctttgtgagtgccgttttaattttggccatccttggagttggaatctggtatacgttgtctaatgcttaaagctgctgttttgaattttacaataacatgtaaaactcttgctcacctagcaccgagctttttagggagtttcctagcctaaggaatccagcagctgcagcagggtggtgtggagggcaggaagtcaggggatttccagggtcctggctctgcatcccttgctggactgccaagtgaccacaagcaaggtgctcccccactctgcccgccttcatttattttcttcagtgagtcagttgaatgagataagttctggctctctattgacactttattagcttttatattttatatttcctttatttcacaagcaatggatttttaattgcagaaaaatcagaaaatatatttaagaaagaaaataaccacgatccagccatttagatcactgttaattggtgatgtcaacacttcttgacttaaaatatatatgtatgtatataggtatacatagacatcatttttccctgaacattcctactataagggatttatggtactatattgaggatactccctgcttctcagatttgatagggttttaaatctcaatcatttacaaggactggccagagcccagtcggaagagctctctgcagcctgtgccaggaatctttgcatacagcttctcagtggcaaatattactcaaaactgggctgcagccagattttccttctcctttccaaaagggatataaatctctgatttggaaaatgatgagtaacccccaggttctcttttcctatctcatttacccagcaaggcctcaaatcttctattttaatgtatgatggattccatatgtatgattgtgtggtataaaatatatcccacatcttgtccttagcaactagtgttttctccaatctccagaactgcttggttcccaaaaggagatggaatatacagccagagctggtgaggagtatttagctacaagccttaacctcagaactcttggctcttcactgccttgaaaaaccttggacatttctccctttgcttctatttcctcatccatacagtggggaaaatattttctgtttcccagggaaattgcaatggctgacgtgtatccagttccctgtggccaagtaccaaggcctttgcccactcctgggactggtgttgacatcagaaataagaaaacaaagacccctgtgattgcattaggtctcctgagatacatgcagccttttctgggctcactgtccacacacaggtataatgggagggattgaatcagggatttgaaggccaaggctgccctggctttgaaaggctgcagaaaccttccgttcatgtctcttgacaatgacagccaaaaccttttccatgattccagagaacacggccttgcttgttacttttgacctgtggtttttaagactacctaattagtagttagaacttgtgatgattactcctttccctgtcacctgtggtcacaaacacatctagttttcccagacaaattttttcttacaggatcccttttgccactcagaccagaaagttgagggctgtgttctccttagatggttccattggcagcctggcccaagcatagtcttcagggtattgaaaaattgggttccttttagtttggaattaatctcattcacctctagtcttatccccaagcctattcttaaatttttttgagtcatggattgtgttcagactgatgaaagcagtcaccactgttccccttaaaaatgcaaagccagctgggcgtggtggcgcacacctgtaatcccagcactttgggaggctgaggcaggcggatcacgaggtcaggagattgagaccatcctggctaacacggtgaaacactgtctctactaaaaaggcaaaaaattagccaggcgtggtggcaggtacctgtagtcccagctactcaggaggctgaggcaggagaatggtgtgaacctgggaggcagagtttgcagtgaaccaagatcacgccactgcactccagcctgagtgacagagcaaaagaaaaaatgcaaagccacacagttttacagacaatttcagaggcttcatgaagtccctgaaacatctctgtggatcctagtaaagcaccattgctctatgagtgtttctttggtaccattcccaagctctcctagatgagacactaggatatgagagttgcaaccagtcccaccatggctgcccctatggctttgggaactgaccatctacctctggggactccttttcctcaactgtagtaaagggagatgcaggggctgatttaccactagtttttgtgtctctgagattgtgtagtctcttgatcaactatttcatttctttaggcccagctgtatccaactgggtgatggaggacggtactaactctcctcagagttcagacggttagttctccctctgctagcagggtgcattgacttgactcctgatgggcaaaggtccccaactagccactgctcatgttccttctttttttttttttttttaaggagtcttgctctgttgctcaggctggagtgcagtggcgctatctcagctcactgcaagctccgcctcccaggttcatgccattctcctgcctcagcgtcccaagtagctgggactacaggtgcctgccaccacgcctggctaattctttgtacttttagtagagacagggtttcaccgtgttagctaggatggtctggatctcctgacctcatgatccacccacctcggcctcccaaagtgctgggattacaggtgtgagccactgcgccaggccccttctttcttttttttattcatatagtacattcatcttcatcctcttgcctataccctcaataactttgtaagatagggagggaggaacatggacttgtaactgctacccagctgctgaaacaagggagccatcagctggaactgggaaagcttttatggacatatatggtcttacacacacaggctttatacaatgtatatatcactacttagagtattttaagtacctaaatataggcctggcatggtggttcacacctgtaatatcagcactgtgggaggctgaggggggcagatcacctgaggtcaggagttcaagaccagcctggccaacatggcgaaaccctgtctctactaaaaatacaaaaattagccacacttgtaatcccagctacttgggaggctgaggcagaagaatctttgaacccaggaggtggaggttgcagtgagtcgagatggtgccactgtgctccagcctggggaacagagagagaccctgtctcaaaaaaaaaaaaaaaaaaaaaaaaagatgtgaaagaactgtttgagaatgtcttattcctgaagttacccttatgacttgttcatataacatgttatactgtatttatgatagtgatatggatatgaacttaatcatagttttctagagtgtctgaccttctctagttttatataattctttcattatgaaagttttgttagtgctttttttttttttttttttaacacagaataagctacatggttctcttctctagaatatctaatgactggttaaatcacatagcaaagttagacatcttgaatttacagccatcatactaaaacgggaaaataccgcctgtgtgggccttaagctactgcaagtgtgccaaatgtgaacagtcagtgggagaatacacatgagcaagttttgcaaattagaggagtcttcttgacagtacacaagggtgtattcagcagagtcttgagtaaaggcagcatcattggaatatatgtgcagcctcccacgaggactactgtggagcatgtgttgaatcgtaatctgaactcacctgtcgtcataagtcttggcagctaaggtgtctttgtaattgactctggattcactgaagcatttggatattttaaagaactctattgaccttccaacttgggatagaaatccatgcaaaagcatatttttgtgttatgtgcgaaggcctgggaaaaatttggatttctcttagttctcagttgtactttgcattttcctttctttatatgtcagctcttccacaaaggaccttgaagggagagggtaacgaaagtggggattgaggcaagtggtaattactcattgttgtgttgaaacctcctacgtatcccaaatgtggaatgtgagctcaacatcgctctttcttaaagaagactatttattttgttgcctgagtaaaaccttccataaaattgctaataggcctatgtacaatattttcgttatttcagtttgacttgactgataaggaagattgattttaatcataaggcacacagattttttaaaaagtgagtgcaaaatgacttgctaatagactaatgtctgagtaagaaaacaaaaacatgtgtctcccagctctattggaggagcaagagtttcatttaacaatatctgctgtctttgcctaatcactcactagttgctatttttgataatattccaataggcgctgaaagtatacctggaaaatgagacctatgtcatcctatcccactcagcagaaggactgcagtcccaacaaatggaccctttcacagtgctccctggaggagactgtatgtttctgttgggctgtgctagtttgatctgttcttcttgggaaattgcttttactctcacagtattttcctcataatagcctcagcagtggtaactttttgacctttgtgggtgggtttgatttttttttttttccagaaagtaatttgaagctgtgtgttgtgaataaagagaatgagcaatttgcaggaaatttttaaaaaactgcaagttaaagtactgcaaggcttaaaatggcacatgggtgtgaacaaatgagaacgttagaagggaattcaaaagtatcctatcttttgagctaagagctggcaggacattttgatatgactagtgcagcagcagtgagcactggctttatctgctacccactaaccatgtgaccttgagcaagtatctcaaactttgagcttcagtttcctcaggtatgatgtagttgcagtaccatagccatgaagttggaataagagctcgtgtgatgggtgtcatgtagttggcactgtcagtgttttccgttgatcttttgtctgaacagagatcaggtgccgttcccatttcctttcctgaatatactcatttttgtcatttacagccataaaaaactttccatctttagaagttgacaaaaaaggaggggaacaaaaaagggcctggcctcaagatgtgagcaaatactaatgtgcaagtttttagattctttttctttttctttccttttcccttttcttttcatgacagctgtaaatctaggagcttaattattaacctaaatgaagctgaggtttaatgttccccggagcatgcactgatggggaaggatgaattctcatttcctggaggctgaagatctgtgcaggtgtctgtggccaatgttaagcctacgactttagatgagctggcataaatcttgggagagttttcttgtctgtgttccctctgaatttctctgtgctgttagaggcagggacagaagagaaccagcatggcagtgctgggctcagggtgatgcctgcctgccagcacagcggttcttgtccctgtcccacattgcttcttggaagcctttttacagcctcaatcatcttgctttttctaccgcagctataaatgggttggaagccagtgcaacatgggcagggaggacttggtttaatcttttcaagtgctacagcatttctctgttcctttggcatcgttttatggatgttttcccagtatccctttccagtgtcttatgaattggctagcaagagcgcttcccagtctatcagatggagagagcattaggctcagagaaattacatgaaagtccaggatttccaacttcttgttcacttttctaccatattaatcatctctcagacagtgatgtggtaggattcatatgcatagaattccattgtacttattggggggggggtaatttcactttaaatttttagcagcttcgaggacttaattggttaggctccttcaggctgtctttggaaatcttgtcctttgaaaagggaatgctgatacccagaggaatgtatttcttatggtcatgtttcagactgtagcatcttgaaagtcatgtgggctagagcaacttctaggtgtcctttagcacagatgcaggctgggggttgagagtttaaaagctttttctcaaactgtttatgacaaacatagttcatctcccattttggttaattctcagcttaagtattttaagaaacatttggagggcagggacatgcagctgctaagaatccaagacagtgctgttttgaaaatgcaaatatttctggtttgcatttacttgaagtagggtagctttctcccatatattcccttgaatacagatattctttaaatgacatcattttgagtagaatacagagtccaggtggttttggggaaatcattaaaaaaacaaacaaaaaaaacaaaacaaaacaaaaaaacaaaagcttaggtatcattgcattctaggggccaagaaacagaacgatggtatttttggcaggcacccaggcccagcaaaacccacaccccaaggctgtctctgtagcttcctgtggttttcccactgaagagaaacagcctttctcttggagggcctgggatggcaaatatgtatatcagcttgatcagaatcataatattccggctttgaggttatgtcccaacaggcttcatttaggaaatttgatgcaccacaattgttgcaaactgagctgaactgattttgtggctcctaatggtgcaagttttttgtttgtttggtagaaactggtaacgtcctatattagaagttatgctaccaggtgatctgtaacaataaagtcaagtctcagactaaattttgccacagataagaacattagcaagcaggcacaaaagttagtcattcagcatgttcctgtggactgggaaaagccccaacctgtcctttgggtatgtatctcacgtcaaagtttaggtagaaacagatgcagaaaaattctcaatacaggacacatctaaacttttcattggcgcaggtgatggaatcctctgttaagtgtccagacccaggaccagagtgccactgcagaaagtgttaggctgcctggtttgccagattcttataacccacgtatatatgcaaggttagagatccctgtacagtatttccagccaacacatatatatattgaattctattgttttcatcggaaaaattatttctaccatcctttatacttgtgaggaaatcctctagtatagatttcaaagctgtagctgatgcttttgtaatagccacacctggggtatgcactcctgattagggtacctcagatactaactagctacccataagaggaagggagggagggagggagaaagggtttgtgtgtcttcccacatacttgcatgcattcatactgtgtattcagaaatatttaaaaataaattacagataataggtatctctttatttgaccctggaaatattatgtcttgtataatgttgccagccattcatgagtgacttgaaatgtcaactgacctttggcctgccatggtgttttagtcagagccattgatgaatggctcaccatggggcagagaagagagaagagaatgataatttttgatagttttgtaggttttttttttcttttatctcagtctcattcggttgcccaggctggagtgcagaggtgcgatcttggctcactgcaacctccacctccaaggttcaagggattctcgtgcctcaccctcgcaagtagctgggaatactggtgcatgccaccacaccaggctaattgttgtatattttgtagagatagggattcgccatgttgcctaggctggtctcagactcctgagctcaagcagtcctcctcccttggcctcccaaagtgctgggattacaggcataagccaccatgcccggccagctttgtaggctttttcaagcttttttgcattctttcatttgatattctggtattgtggagatgttgtatcccccactcaattttatacacaaatcgttgtccagggtcatagaatgagtaaattacaggaactataacttgaacgaactctcatcctttatagttcctctgtactataagggcaagttactaccaagaagagctattactattcttcaaagaataccatagaactttttcaccttggggcagttattgccaaggtaagaccatgtactaaggatatattatataacagaatgctgggagatttctgtcttaactagtgataggacaggtgatttaaaccagctctcttactgaagtcaccttaagaaactggatcagttgcttctaaaaatcttcttaaacatcaaatcactattataaggagattctgagttgagctttgagagagaatgtaagcacagaggagcaaagccgtagtattagggcaattttttgttttatggccatttgctgatcaggaaaaggaagttgagagcgtgagccacacctttagtgtcctttcaaggtgaaggagataaaacttgtagtctgggtgctttcaagcctgagaacccttataaatcattcttgactttgggttggaactctatcaagagatacacctaggagtaagggtgaagtgggtgtaaaccatccctcacattggctgtaacaatttcacattatttaagtggcccggaaaccgtaaggcttccttgcattaagataattctatttagctaatgcccatagttgccaggtaaaagcaatgaaatcttagagggaaatatgatcctagtcctaaaattatttatatagataattttgctgttacaatatccagccacagaggtaaccaggcacacaagaagagaaggtaccataagtgagagttggcagaagcaaagacaaaagaaatacagacatacagagattctagatattgtacttattagacatacactatgaaatactattcttacagcattaaaggaagtaaaagcccaaattttagttgtattggggactggaaactctaaaatacggctttccagatttaaaaaactgaaatctagaactgaaaattcaaaaacaaaatgaataggtgtataggcaattatatacatctaaagagcaaattagtgaaatggaaaataggttagaagaaacttcagagtgaagcactgtatacacaaagatggaaaatataaaaaaggtagaagatagagtgagaaagtctaacagtcataattggaaatctagaaaaaaagaaataatggttctatagcaacattgaatgggattatagataaactttttttgaaacaaatgaaaaacctgaagcctcaaatccaagaagcccaacaaatttataacagtacaaataaaactaaatccacaccaagacccatcataatcaaacttcagaaaatggaatataaagacatcttaaaagcagtgggggatggggaaaagacattaacttctgaagaatgatggtcaggcttacagttgacttgcagagtgtgagccacatgacaatggaaataacttctttagtgtgctgaaggaaagaaacgcatcccacaattttaaacccagcagataataccgttcaagaatgaaagggctgggtgcagtggctcacgcctgtaatcccagcactttgggaggccgaagcgggcagatcacgaggtcaggagatcgagaccatcctggctaacacggtgaaaccccgtctctactaaaaatacaaaaaattagccgggcgtggtggtgggcgcctgtagtcccagctactcgggaggctgaggcaggagaatggcgtgaaccgaggaggcggagctcgcagtgagcggaggtcacaccactatactccagcctgggcgacagagcgagactctgtctcaaaaaaaaaaaaaaaaaaaaaaaaaaggtagggggggaagagtaaaagtgaaggtattaaaggtattttgtatagacaagaacagagtccaccactagcatgtttacacaaaaggacttttattgggtcttctccaaataggaggaaggtgatccaaaacgttaaatcagaagtataggaaaaaaaaaaaagtatagaaagtggttaaagatggggataactctaggccaggcacagtggctcatgcctgtaatcccagcacttttggaggctgaggcaagcgcatcacttgaggtcaagaatttgagaccaggcttgccaacacagtgaaaccccatctttactaaaaatacaaaaattagccagacgcatgcctgtagttccagctacttcagggggttgaggtgagaggattgcttgagcccagaagtttgaggctgtagtgagctatgattgtgccctgtaccccagcctgagcaacagagcgagactgtcccaaaagaaaaaaaaatgtgggtaactctaaatgaacatttgaacatttactgtataagaaaatacaatattgagtgggatattttttaaaaatagaaatttaaggccgaggtgggcggatcactcgaagtcaggagtttgagaccagcctggccaacatagtgaaaccccacctctacaaaaaatacaaactaaagtttagccgggcatggtggcagacacctgtaattccagctactcaggaggctgaagcaggagaatcacttgaacctgagaggtgaaagttgcagtgagccgagatggcgccaccgcactccagcctgggctacagagcaagactctgtctccaaaaaaaaaaaaaaagaaaagaaaagaaaagtattaaaacttggaggaggtaggtgattggaattagtctgttctaaggttcttgcattgtcttggaagaggttaaagataggaattaatgcttgactgagataagtcaaggatatatgttataactgatagactaaacagtaaacaaatagaaaaattgtataacttctgattaaaaatgaaaaaattgaaaaagatgatttaaaggaagaaaaaaacaagtacaagatacaaagcacaagaagtcatggtaaactgaaacccacatgtatcagtaattacattaaacataattggttaaatgctggcggtagaaagattatcaaaccagatttttaaatttatatgcattatacaagcaatatatcttaaacttacagaatgactgaaaataagatataagaacataatattttagtattgaattttcaaaaatcagttgaaaataaacttaaataccacaagaaagctgctgtagctatattagtatcagacaaaacagattttaaggcaaaaagcattaatttgtaatacaattactttataataattggttttaattcaccaggtagaatttctaaatttgtatgtatttaataacatgtctataaaatatataaaaaatttacaagaactaccagaaataaatgatttttcccccctaagatggagtcttgctctgtcacccaggctggagtgcagtggtacgatcttgggtcactgtagcctccatctcccaggttcaaatgattctcctgcctcagcctccgagtaactgggactacaggcacatgccatcttgcctggctaatttttgtatttttagtagagatggggtttcaccatgttgcccaggctgatctcgaactcctgacctcaagtgatccgcccacctcggcctcccagagtgctgggattacaggcgtgcacccacgcccagcccggaaataaatgatttataatcacaagtagaaaattttaatgaatcggctgggcgcggtggctcacacctgtaatcccggcactctgggagcctgaggtgggcggatcacctgaggtcaggagtttgagatcagcctggccagcatggtgaaaccacatctctactaaaaaatacaaaaattagctgagcatggtggcacatgcctgtagtcccagctacttgggaggctaaggcaggagaattgctggaacctgggaggtggtggttgaagtgagtcgagatcacaccactgcactccagcctgggggacagagcaagactctgtctccaaaaaaaaaaaaggaaaattttaatgaattattctcagtaattgatgaaaaaaggataccaaaagaaatcgggaagggttattgaacttggttaacatgattaataagcatattctagtgaatacatatagaatactgcacctaactgaaatatagaatactgcacctaatttgaaaagaaatacatattcttttcaagcacacacataatattttacaagaatttgctggcatagacgggataattaaacaagtttcaacgaatttcagagtgaaattgtatagatgtatactgattccactgtaattatgcaagaaatcagtaataaacagataactagaaaatcatccccatgtgtttggaaattcagatacatacttataaaactcattaattaaggatgacataatggaaattaagaactattttaactgaatgattaaaaaaattataccaaaatttgtaggatatggagaaagcagtacttaataaaaatgtggctcatgcctgtaatctcagcactttggggggtcaaggcaggaggatggcttgaagccaagagtttgagaccagcctgtgcaacatagcaagaccccgtctctacagaaaattaaaaaattgccaggtgttatggcacatgcctgtagtcctagctacttggaggctgagataggaggattgcttaagcccgggagtttgagcttatagtgagctctgatcatgccactgcactccagtgtaggtgacagagtgagtttgagcccttgctaagaaaagccttaaaacaggcccgaaattaatgagcaaatatttgtatcaagaagtcagtaaaagcaacacaataaatgcaaacaagtagaaggtagaaattattacagagaagaacagaaagacctgtaaaattgctaaacctatggtgaggctgagcaaaaggaagattaacatgtatcttagcattgaatttttaaaaatcagatgcaggctgggcgcagtggctcacgcctgtaatcccagcacttggggaggctgagataggcggatcacttaaggccaggcattcaagaccagcctggccaacatggtgaaactccatttctactaaaaattaaaaaattagctaggtatggtggcctgtacatatagtcccagctactcaggaggctgaggcaggagaatcgcttgagccccagaggcagaggttgcagtgagctgagatggtgccactctactccagcctgggcaaaagagtgagacactgtctcaaaaaatagaaaaatataaatcggatggaaaagaataaatttatagttcaatgttaaaaaacaaaatgaagtgatattattaaggaggcaggcagatttaggtgaaaaattatgaggaaaagtagagaaattattatataagtcgctggttttaagaggtaagtaaggagttgtaatgtagaagtggcctacctttccttccttcctttcctccctcccttccttccttccttctttccttccttttttgacagtctcactctatcgcccaggctagagtgcagtgacacaatctcggctcactgcaacctccacttcccgggctcagacgattctcctgcctcagcctcccgagtagccgggattataggcataagccaccatgcccagctaattttttatttttagtagagacagagcttcaccatgttggtcaggctggtcttgaactcctgacctcaggtaatctgcccacctcggcctcccaaagtgctgggattacacgtgagccacagtgcctggcgtggaagcgactttgtagggacttcggatgtaatgtgttgatgttcttgactgggttgtagttacacagatggtcactctacactatgtatagagtataatgtagcctatagactatattttacatttctgttacttcacaatgaaaaatgttaagaaaataaataggtgttctgcatgtatgcttctgctggcatgcccatcatttacactgttctttatgccagacaggaaggttcacaacctgacactgtgtctttcagagaatgctcatcccagcttgaaggctcttaacacaagaatttccaattagtagaggtaacctgctggtagatcatataactcatcaaccttaggctgtaagagactgagtccaatgtaagttttcaataatttacccacccacaccatacttaatttaagccagggtatatgaacttcctgaaactgaaactgttccctcttatgctgagtacccagataataggggtaggccaataaatcaatgagcagagaaggactagcttgaagacaacagaaaataaatagggactgtggccaactagagctcaagttctctccgtggagcagctgcaacccaactctggatgattgttacttgcagactactgggaataacgttgccatattttctgattttttttccttcgaagagtagatagaaatgtgaattttaatgtgcaagtacctgatttttaagtgttggttcacaccgcaccccccaccccaaaatactgcttgagtcaaaccaaacctgtacctgggatatgtccagttagtttatgagaataacctcaacagccatgcagattggagagagagaataatgtataaaataatgtactataaccttcttgatggaacttgcctgcgaagcatgttcttatataattctcaacttcaaaattaaaagaaactcaaccaaaattcatacattacaaacgtcactcagggtaataattttcttagtgaaacctggctctctctgcaggggaatgaatttttttaccgtaagtaatttattaaagggattgagtaaaactgctaaatagtgatatcacgcaaagcaatttcttttaggagaaatagctaaagatggactttaaaaatgtgctgcttaatgggttgaatcccaagatgttgtgctcctgtttagatgtagcaggcattttcaaagtggtccgagcaccagcagcatcagtgccatttgggaacttgctagaaataaaaactctcagaccccgccccagacctaattaatcagaaactgtggggttgggcccagctacttctgttttaacaagccttcctggggattctgaagcatgctcaagttttgataaaccactgctatagcttttgtgctttgtgactttttttgtagaatgactttagaaagttaaactttgttattttaaggtttcaagtgaatattttcttcaatgttgacatcttccaagtatccttcaaataatatctttggtttggcttatgtcagtcaagtatgtgttggtttaaaaagatgaccgagaatagaaagttgtatcttctaaaaattcattttaaagtgagattcgtatataacagcagacacaattttatcctctttctgcctttcttatccactacactcatggtatccactcacagcctcactaaggaagtcagtccacttcatgctcagcttttaacttaggggttttttaaatgtatgcatagcatgtatcatgcacagaatgccatagaatccttctctgacccctccttctgttttataagccattctgtgcataaggccacagtgacttcacactggactctggttctgcctcctactaaatggcagagtccaggagggtcccacaacctgtgtactccaggcctacagactataagctctaagtaatggatgctcagcaaatattttttctttgctctagggtctcaactctcagcaggattaatagctgtttaacctacggtgatccttttattagtttgttacagtaagaaatgcatgttttaattggattggaagccttgaaccttttcttaaataataaacatttttatgttgaggtaaaacttaaaaacagtaagtacacagatgttaagtgtacaacttggtgggttttttttcacatgtaaatacccatgcaactgagacaggaataataacagggtggtcgcaggagaatagaaaattccaggcagcagtttcacatgactagcaaaaggaaactgttgaaatagctgcatagactgggcgtggttgctcacacctgtaatctcagcatttgggaggccaaggcaggcagatcacttgaggtcagaagttcgaaaccagcctagccaacatggtgaaacccggtttctactagaaatacaaaaattagctggggtgtagtggcaggcgcctgtaatcccagctactcagaaggctgaggtgggaggattgcttgaatccaggaggcagaggttgcagtgagccaagattgtgccattgcactccagcctgggcaatagagtgagactccgtctcaaaaaataaattaaaaaaagaaatactggataagctaggggctgataagaccctgaaaaaccagggtgtgaaccaagctggctaagaatgactgcacccaacatggctgtggatttgacctaggtttcacctagaacctccttatacattcattaacatatcacacatgcaccagccccgtgaaagtcaaggccagcctgggcaacatagtgaaaccccagctccaaaaatataaaatcacagaatagaaggaaaatcaactgtcagatgctgctgagagactgaatgaggattataaatggcaagatacaggtcttcagtggtctttttatattaatataacacattttttaacaatttttttaatggagtcagggtctcatagccaccacacccagtttatttaacaatcgacgtcaacaattacctggttacatagacttaccagattaatttatcaatttagcagttaatcaaattagatttctcctgttttaaaaatattgaatataaatttcaatgcttttaaagtcttaattaaaaccaggaatctattctcttaaatgcttaaagtacattaagacatatcaaacaaacactttgctgtagtgattacaacgttgaatagtacactaacataccatttataaatatgttgatgctatggatctaaatttgtgtttcttaaagatattcaagagctttattgagatacaatttacataccagaaaatccacccattgtaagactagagtctgataattcgtagtaaatgtaaactgacgtgcacctatcaatctgaggaagtcttgacaagagtcttttggagtgcggagaggaagtcctcattggagtaagttaaagagagaatggagaataatatagatgtttcaagggttttcttttttttttttaatctcttaagggtattgggggaaggtagtaaggagaaggagattaagagggattatgtctaaaatggtaattgtttcatcttgtttgtgttcagagaaaatctggagggatagcttgtctgattccttctgtttagataataaaggatgaaaagacatcatttaagaaatggaaactagcaaatgtaaacttttatgtagtttttaaggttttttcttctggtgagttacttgcatttcattgggagaaaaatcttcctttaaatgttattgataatcaattattaagtaggtgaagcagtctggttcctttttcctcacattgctttagaaattaatacgaatgctaatgaaaaggcaaggaatataaaaaccaacaacatattaatgaccctgaggtcgaagtatgaatatcacaagggcaaaaatagttctacacattgggcatttcagtggatattggttactccttgacaaaagatggcactccttatgcagaaacacgctggatttcccaaagaagcgtataaactagagcaggttctcttaaatctttgaatgaatgcactgagttagttttggctgttactgctcttggaatgtctttttgtttgcatttttccaatttacctccttgttgacatatcaatatttaaaagaaatctcccccccagatttttgacctacaatagtataatctcaaatattggattaattggtcagagcatccatttaaacattttgatttttataatgtcctgcttattaaccagctcaatttttttttttttttttttttttttgcggtagagtcttgctctgtcgcccagaccggagtgcagtggtgcgatcttctcggctcactgcaacctccatctcccgggttcaagtgattgtcctgcctcagcctcccgagtagctgggattacaggtgctcgccaccatgcccgactaatttttttatttttagtagagatggcgtttcaccatattggccaggctggtcatgaactcctgacttcaagtgatctgccctggttggcctcccaaagtgctgggatacgggcatgagccaccatggccggctccagctcaaatttttttaaccagccttcaatgctcagccaagccattaatacctctgccttgccttttatctcctgcttgcattcttaaggtcagctagactgagtttagggccttctcagatcttccctgagcaggtgtgtggttttgggcatgtacctagccttgtgcctgtgccatgttgtattagtctttctcatgctgctcataaagacatacctgagactgggtaatttataagggaaagaggtttaatggacttacagttccacatggctgaggaggcctcacaatcatggtggaaagcaaaagggaagcaaaggcacatcttatgtggcagcagacaagggcttgtggaggggaactccctttataaaaccatcagatctcgtgagacttattcactatcatgagaacggcatgagaaagacccgcccccatgattcagttacctcctattgggtccctcccacaacacatgggaattatgggagctacaattcaagatgagatttgggtggggacacagccaaatcatatcacatattttctagattcttaagaatatgcttcagcttttcaaagcctcctttagtattttccagattttttaaagctttttgttggcttattgttacttcagctgttacataccaagtcaggagatcatgatgttaaacagttgcctctgatagttttcaacagttggccctggaaaaaaggctgggtgaattctgaatcaggtcaaatgaggacattttgtcagtggatcttcctgacaccatacaggtgacattttctaaaaatgaagatttatagaagctctgactctaaactccacccccacccccttgcccccactgactattgggctgccggttttcactgtgattatgtgttactgatgttcaaggctactatggagcttgagggggtgaggcgatgagaataggagaagttgaaatgccaaaaagcttattgttttaccaagattcagtttttcttgaatacacagccccagattttgtcagccttctctttccccttatagaaaggattttcagaggttcttactccactatttttgctgacattgctatgtgtcatcttgtcatgtattttctgtgtttatcaagccctatttggcaataattatattttacaagtagtaagtatgtagcatttctttttttttattatttttatttttgagacaggatctctcactctgtcgtccaggctggagtgcagtgttgtgatcatggctcagtgcagcctcaacttcccaggctcaggtgattctcccacttcagcctcccaagtagctgggactacaaatgcatgtcaccacgcctggataattttttgtagagatggggtttcgctgtgtttcccaggctggtcctaaacttctgggcttaagacatccaccgccttggcctcccaaagtgctaggattataggcatgatgcctgtaatcccactgcacctggccatgtgtagcatttctctttccttcctttccttttcttccttccttccttgcttttttttgtttttgtttttgttttttgtagatggaatctcactctgttacccaggctggagtgtagtggcatgatcccggctcactgcaacctctgcctcccaggctcaagcgatcctctcacctcagtctcccaagtggctgggactataggcgcacatccccacgcctggctaatttttgtatttttggtagaaatggggtttcatcatattgccaaggctggtctctaactcctggactcaagtgatctgcccaccccagcctctcaaagtgctgggatcacaggcatgagccaccatacccagcccatatgtagcatttctattgccatgtttttttgagacagtttcttgccccatcacccaggctggagggcagtggtgcagtcatggctcactgaagcctccaattcctggattaagtgattctcctgcctcagtcccccaccaagttactgagattacaagcacctgctactgtgcccagttaacttaaaaaaaaaatttgtagagatgacatcttgctatattgcccaggctggccttgaactcatggcttcaagcagtcctcttgcctcggcctctgtattagtccattttcatgctgctgataaagatatacccaagactgggcagtttacaaaagaaggaggtttatcagacttacagttccacatggctggggaggcctcacaatcctggtggaaggtaaggaggagcaagtcacatcttacgtggatggcagcaggaaaacagagcttgtgcagagaaactcccattcttaaaaccatcagatctcataagacccattaaccatcaccagagcagcatgggaaagacccacccccatgattcaatcatctcccactgggtccctcccataacatatgggaattatgggagccacaagatgagatttggttggggacacagagccaaaccatatcattctggccccgtccctctcaaatttcgtatcttcacatttcaaaaccaatcatgtcttcccaacagtcccccaaagtctcaactaatttcagcattaacgcagtagtccaaagtctcttctgagacaaggcaagtcccttctgcctatgagcctatataaatcaaaagcaagttagttacttcctagatataatgggggtacaggcattgggtacatacagccattccaaattggagaaattgaccaaaacaaaggagctcaggctccatacaagtctgaaatccagtgaggcagtcaaatcttaaagctccaaaatgatctcctttgactccgtgtctcacatccaggtcatgctgatgcaagaggtgggaaggcatgattggttcccatggtcttgggcagctctgcccctgtggctttgcagggtgcagcctccctcctggctgctttcacagactggcgttgagtgtctggctcttccaggcacacagcacagttgtcagtggatctatcattctgaggtctagaggacagtggccctcttctcacagcttcactaggcagtgccccagtaggaactctgtgtgggggctctcaccccacattttccttccacactgccctagcagaggttctccatgaggaccccacccctacagcaaacttcagcctgggcatccaggtgtttccatacatcttctgaaatctaggcataggttcccaaacctcaattcttgacttctgtgtacttgcaggctcaaaaccacgtggaagctgtcaagtcttggggcttgcattctctgaagccatggcatgaactctgtgttggcccctttcagccacagctggagtgtctgggatgcagggcaccaagtccttaggctgtacacagcacagggaccctgggctcagcccttgaaaccattttttcctcctaggcttcagggcctgtagtgggaggggctgccacaaagttctctgacatgccctggaggcattttccccattgtcttggtgattaacattttggctcctagttacttaagcaaacttctgcagctggcttgaatttctcctcagaaaatgggattttcttttctattgcattgtcaggctgcaaactttctaaacttttatgctctgtttcccttttgaaactgaatgcctttgacagaacccaagttacctcttgaatgctttgctgcttagaaatttcttctgccagatactctaaatcatctctcaagttcaaagttccacaaatctctagggcaggacaaaatgacaccagtctctttgctaaaacatagcaaaagccacctttgttccagttcccaacaagttcctcatctccatttgagaccaccttagcctggaccttgtttatatcactatcagcatttttgtcaaagccattcagcaagtctctaggaagttccaaactttcccacattttgctgtcttcttctgagccctccaaactgttccaacctctgcctgttacccagttccatatttgcttccacattttgggtatcttttcagcaacaccccattcctggtaccagattactggattagtacatttttatgctgttgataaagacatacccgagactgggcaatttacaaaattaagaggtttattggacttacagttccacatggttggggaggccttacaatcctggtggaaggtaaggaggagcaagtcacatcttacatggatggcagcgggcaaagagagagcttgtacaggggaacgcctcgttaaaactgccatatcttgtgtgacccattaactatcatgagaacagcatgggaaagacccacccccatgattcagtagtctcccactgggtccttcccataacacattggaattatgggagctgcaagatgagatttgggtggggacacagcaaatccatattagtctcccaaaatgctgggattacaggtgtgagccatcttgctggccagagcatcttttcatatgcttacttgtatatcttctttggtgaggtatctgttaagatctttggctcattttttaattgggttgtttgtatttttattgttgtgttctaagagttcttcatgtattttggataatagtcctttattaaatgtgtcttttgtaaatagtttctcgtggcctgcagctggtcttttcatccttctgatagtttctttttcagagcagaaatgtttaattttaataaagtctagcctaccagttacagatggtccttgacttataatagtttgacttacaatttttcaatttaccatggtgtgagagtaataggcattcattagaaacatatttcaaattgtgaattttgatattttcccaggctagtgatgtagtatgatattctcttgagatgccatgcagtggcagcaagctgcagctccactcaaccacacgatcgtgagggtaaacaactattgactagtactctatgttgcactgtgttgccagacgatcttgcccaactgcaggctgacataaatgttctgaacacgtttaagggaggctagggtaggctcagctatgatgttcagtagttaggtgtaataaatgcattttatatttagggtgttttcaacttatagttggtgtatacccccatcataagttgatgagcatctgtttttctttcatagatcatgcctttggtgttgtatctaaaaagacattgccaaacccagagtcatctagattttctcccatgttatcccataggaggtttatagttttgtgttttatatgtaggtaggtctgtgatacattttgagttattttttgtgatggggtgtaaggtgtgtgtctagattcttttttttttttttccatgtggttgtccagttgctacagcacgatttgttgaacagattatcttttctgcattgtgttgcctttgccccattgtcaaagatcagttgactaaggtgggtctaattctgggctttctattctgttctgtgatatatttttttattctttcaccaaccacactgtcttgctgactgtagctgtacagttggtctagaagttaggtagtgtcaatcctccaactttgtcctttaatattatgttggcttatctgggtcttttgcctccctacaaaaactttacaatcagcttgttttatatctacacaatacattgctgtgattttgatgtgattgcattgactctataggtcaaattgggaaaaacttgacatctcgacatattaagtcctcctatccatgaacaagaaatatcactttatttttagattgtctccaacttctctcagcagtagttctccatatgtacatcttgtacacattttgttagatttgtacctaggtatttttgggtgttgctaatgtgaatgatattgtatttttttttaaattaaaatttgatagtatttgaacatcaattcagaaatttgtcttgttgacaaatgtactttattcatagatttttctttcaattttttatgtgatagaatacatataaaatttgccattctgtttttaaatgtacagctcagtggtattaaattccttcataatattggcagttatcaccaccacttaccttcacaattcttttcttttatagaactgaaactctataaccatcaaacaataactccccattttcttctctctccagccctgccagccacttttctaagtccctcataagtagagtcatacattatttgtctttttgtgattggcttattccatttagtataatgctctcaaagttactccatggtgtagcatgtgtcagaatttccttcctctttaaggttgaataatatttcattgtatgtagcatatactacattttgtttatccattcatccatggatggacacttggattgcatccacattttagctattgtgaataatgctgttatgtacatgagtgtacaactatttcttcagttccctgcttttaattcttttgggtgtatagccagaattgaattgctggattcttttgggtatatatccagaattgaattgctggatctaataattctcttttaatttttttaagtaactgccatgctattttttatggtggctgcagcatgttacattccaatcagcaatgtagaagtctttttttatcgtcacatgctcatcaacacttgttatttttctttttcgttgtaaaatagtagccattctaatgtatgtgaggtggggtctcactgttttacttgcagttctctaattatcagtgatgttgagcatcttttcgtgtgcttattggccatttgtatatctttagagaaatgtctgttcacatcatctgcccatttttaaacttggttgtttgttgttgagttttagaattacctgtatgttctgtatattaatttcttatcagggctgggcacggtggctcatgcctgtaatcccagcactttgggagcccaaggtgggcggatcatgaggtcaagagatggagaccatcctggccaacatggtgaaaccccgtctctaaaaatacaaaaattagccaggcatggtggtgtgtgcctgagtctcagctactcaggagcctgaggcaggagactcacttgaacctgggaggtggaggttgcagtgagccgagatcacgccactgcactccagcctggtgacacagcaagactctgtctccaaaaaaaaaaaaaaaaaaaaaaaaaaaaattcttatcagatatgattttcagattattttgtcccattccagaagttgcctttttactctgttgatgttgtccatctatgaaattcagtctattttttttgtttcctgtgcctttgatgtcatatttaagaaatcattgctaaatccattgttgtgcagcttttgccctgtgttttcttctaaaagttttatagttttaggtcttccatttaggtctttgatctattttgagttaattttttaatatggtgttaggtgagagtccaatttccttcttttgcctgtggatatccagttttcccagtatcattcattcaaaagactgtcctttttttttttactgaaacaccagggtattctgtctaggtcctgctgctgcttggtgcacagaaagccaatcactgagacaagtgtggccaagaaacaaggctttaaatctggtgctgcagccaaggagataggagctcagtctcaaatccatctccctgactgactaaaactagggctttatatagcagggaggaaacataacaatatgtaagaaaataaaaactagagaggggtaaggaagcatctggtgctgtgatctgatgagttccagttatttgattctttttttttttttttttagtaggcctgaaggtcctttcctgagggaaggaactcagataaaacaaatatgagtttcaagctttaacagcagaagggtcaatttccatgtttatccaaaaacaactatctgtgggactcttgggttggtttcacttttttttgttggatgatcttggcactcttgtcaaaaattgagactgtatctgtgaggattgtttctgcgctctctattctgtttcgttggtctatgaatatgtcttgtctttatgcggtactatgctgaactttgtagctttgtactatagtaaatttgattactgtagctttgtagtaagtttggaaatcaggaagtgtgagtcctccagctttgctcctcttcttcaagattgttttggcaattaagtgtctcttaagattacatatgaattttaggatggctttttttttatttctgcaaaaaacaccgttggatttgtatagagatcacaatgaatctgtagatttccttgggtaggatcttaacaatactaattcttccaattcatgaatatggggtgtgtttccatttatttatgatggggtgtatttccatttatttatgatgtctttaatttcagcattgttttataatttttattgtataagtctttcacctgaagttaattcctaagtattatattctttttgatgctattgtaaataaacttatagtttctttttttagattgttcattattagtgcatagaaacgtaactggtttttatgttaactttgtatcctgctgctttgctgaattcagtttttgtagactgtagggttttgtacatgtaaaatcatatcatttgcaagcagaaatcgttttacttcttccttttcaatttggatgccttttatttattttccttgactgatttctctggctagaacttctagtactgtgttgaatagaagtggtgaaattaggcatccttgcctttttcctgatcttagagagaaagcgttccttctttcatcactgtgtatatttgctgtgggttttgttgcatatggcttttattatgttgaggcagtttccttctattcctagtttaagtgtttttatcatgaaaggggttgaattttgtcaaatgctttttctgcatcaatcgagatgattgtgtggcttcccccccgccccactttcttcagtttatatggtgtgttacattggtttttcgtccttgcattccaggaataaatctcacttggtcatgttgtataatccttttaatataagatataatctaatatgtagaaaactgtaaagatgtcacacaaaaaactgacttaataaatgaattcagcaaagtagcagaatgcaaagtcaacacagtttactgttatttcattgaggatttttgcattaatttataagtggtattagtccatggttttctcatagtgcctttgtctagctttggtgtcaggctactgctggcctcatagaatgacttaggaagtgttccatctttaattctttagaaaagtttgaaaagcagtggtactagttctttaaatgtttgatagaactcaccagtggaaccatcaggtgcagggcttttgtttgccaggagatttctgattactgattcaatctccttattggttataggtctattcagattttccatttccttgtgatttcattctgatgggttttgtgtttctaggaatttgtctgtttcatctaggttatggtattaggtttgtaatttcaaattccacttgttcattgctggtatactggaaaataatggagttttttgttttgttttgttttgtttttgacatggagtcttgctcttgttgcccaggctggagtgccatcttggctcactgtaacctccacctcctcccaggttcaagtgattttcctgcttcagcttcctgagtagctgggattccaggtgcacaccaccacacctagctaatttttaaatttttagtagagatggagtttcatcttgttggccaggctggtctcaaagtcctgacttcaggtcatccacccacctcggcctcccacagtactgggattacaggcatgagccaccgtgcccagcctagtcttatttattgactatgtatcctgcaccctatgtatcctgcagtgttgctgtgattgcgtgttagttccaacagtgtttttatttatttggattttctacgtgggcaggcatgtcatctatgaacagacagttttatttcttccttcccaatcagaataccctttatttctttttcttgtcttatttcattagctaggccttctattatgatgttgaaaaggagtggtaaggggattttcttgccttgttcctgttttcttgccttcttgccttcatggagaaacttctggtttttcatccaccattagttaaattcttagatgtagagattttgtggatgttctttatcaagttgaagtttccctctgttcctagtttactgagagtttttgtcataaatgactgttcaattttgtaaaatgttctttctgcacctattgatatgatgtgattttcttcttttgcctatggatgtgatggtttatattgattttcaaatgttgaaccaggcttgtgcacctgggataaatcctacatgatcgtggcatataattctttttatatacagtcatgtgttgctaaacgatggggataccttctgagaaatgtgtttggtgatttcattgttgtatgaatatcgtaaagtgtccttatacaaaccgtgacagcataagcctactgcacacctaggctatatggcatagcttgttgctcctaggctgcaagcctgtacagtatgtaactgtaatgaacactgtagacaactataacacaacggtaagtacttgtgtatctcaatgtatctcaatatagaaaaagtacagtaaaagtatggtataaaagatttttttaaaatggtacacctgtgcagaatacttaccataaatggagtttgtagggctggaagttgctctgggtgagtcagtagtgagtgactgtgaaggtctaggacattttgtacaccactgtagccttgaaaaacaacactaaacttaaaaaatatttttctgtcttcagtaataaattacctttagcttactgtaacctttttcactttataaatgttttgattaaaaactttttttactcttttgtaacaacacctagcttaaaacacaaattgtacagccatacaaaaacattttttctttatacccttatcctatacattttttcctttaaaaatttttattttattatttaaacatttttgttaaaaactaagacacaacatacacattagcctacgcctactcagggtcaggatcatcagtatcactgccttccacctctacatcgtgacccactggaaggtcttcaggggcaataacatgcatagagctgtcatctcttatgatagcaatgccttcttctggaatgcagttaacttttttttttttttttaaataagtagagggattacactttgctaaaataatgctaacatgtatagtatagtaaatatataaacataacatagttgattatcaagtattatgtactatatataattgtacgtggtacacttttatgctacgggcagcacagtagtttatttacaccagcatcaccacaaacatggaagtaatgttgttgcactatgacattgtgatggctacagcttcactagggattaggaatttttcggctccattataatctgtgggaccacccattgtatatgcagttcctccttgactgaaatgtcatgtggtgcattactgtatcattggattcgatttgctaatattttaagattcttacatctatgttcatgagatatattggtctgtagttttctagtaatgtctttatctggctttggtattagggtgatgctggccttatagaatgaattaggaagtattccctttgcttctgtcttctgaaagagattgtagatgattggtataatctctttcttaaatgtttggcagaattcccccagtgagcccatctgggcctggtgctttctatttgggaaggttattaattattgattcaatttattttatagaaataggcctgtttagaatttccatttttttcttatttgagttttggtggattctgtctttaaataattggttcaattcatttagtttatcaaatttctagatacggagttgttgatagtattcttttattatccttttcatcaatacagatctcatagacatgaaaaggataataaaggaatactatcactaaaaagtgattctctctttttatcttagtctaattggaggcttatcaatttaccttgtcaaagaactagcttttggttttattgattgtttgtttctccattgattttctgttttcagtgtcattgatttctcctctagtttttattctcttttcttctgcttactgtggatttaatttgctgctcttgttacctaaggtgtaagatcagatgattgattttaggtctttcttcttttctaatatattatttcagtgatacagatttctgtctctaagcatttctttccctgcatctcatgaattttgatacattgtgttttcatttctatttagtttaaatattttaaatttatcttgagattttttattcatgtgttattgttcaaccttacatatattgagatattccaattatctttctgttgtgaatttctgggttccattgtggtctgagagcagactctttatgatttcttttcttttaaatttgttaaagtatgttttatggcccagaatgttctaccttggtgaatattccatgtgaatgtgagaagaatgtgtattctgtggttgttggatgaaagagagaggtgaattctatccagttgattaataaatagtgttttgagttcaagtgcgtcctttttaaccttctgtctgctggatctttctacttctgatagagcagtattgaagtctacagctacaaaagtagattcgtctatttcttcttgccgtactgttagtttttacctcatgtattttgatgcactgttgttaagtacatacgcattaagaactgtgtcttactggagaattgagccctttattattatgtaatgcccttctttatctaataacattatttgctttgaagtctgttctatctgaaattaattcagatacttctacttacttttcattagtgttagcatggcgtatttttttccatctacgtttaatgaataaatgtctttatttaaattgattttcttttagataccatataattgggttttatttcttgttccattataataatctgccttttaattggtacattcagatcactgattattgatataattggattaatatctgccatatttgtaactattttccatttgtcacctttgttcttttttgctatatttgtcttctagtcctttttcttgccttttgtggtttaccagcatttaaaaaattattattattattattttattttattttattttttttttttttgagacagagtcttgctctatcacccaggctggagtgcagtggtgcatcttggctcactgaaagctctgccttctgggttcacgccattctgcctcagcctcccgagtagctgggactacaggcacccaccaccattcttggctgattttttgtattttttttagtagagacgggggtttcactgtgttagccaggatggtctcgatctcctaacctcgttatccacccgcctcggcctcccaaagtgctgggattacaggcatgagccacagcgcctggcctgtatattttttaaggtagggtctcactctgttgtccaggctggagtgcaatcgtgcgatctcagctcactgcagcctcaacctcccgggtttaagccatcctcccaccatagtctcccaagtagctgggactacaggcatatgtcaccatacctggctatttttttttttttttatattttgtagagacctggtctacaaaatgttgcccaggctggccttgaactcctggactcaagtgatcctcctatctcagctcccccaaagtgctggggttacaggtgtgagccactgtccccaaccaacatatttcaatatggcttcttttatctccctttgctggaagcaaaagagatttttctcgagtatttactgagagaacctggtttagctcctgtaagtaaaactcacaaaagcatgggggcctccctataactaggtccccctggagtttttatcactggggcttgtccacacctagcaatttttgtcagctacagtttgtttttctgcccctctcccagtttctgtggaggtttctgctccagcctgttgtgattctctgtatccacctgactgtctctccagttctgggagcagtggtgtcttagcctgttttcacactactatcaagaactacctgaaactgggtaatttataaagaaaagaggtttaattgactcacagttccacattgctggggaggcctcaggaaacttacaattatggtggaaggggaagcaaggcacttcttacatggcggcaggagaaagagagcaaagggggaagtgccacttttaaatcatcagatctcatgagaactcgctatcgcaagaacagcatgggaaactgcccctcccccccgatccagtcaccgcccaccaggtccctcccctgacatgggattacaattttagatgagatttagtggggacacagagccaaagcatatcaagtggtttctcctgtgacctcactgaagtttttgagaaatacatgcacgtgtattttttaagtcatcaagagcaagtaagtataatgctaaacaagaagttaataaaaacttcatgtttcctcccctctttgaaaatacattagcaattgtttttagatagagtgtacatttcctggagtcattgtttaagaataatagacaaacaagctgggcatggtggctaacacctgtaatcccagcactttgggaggccgaggtgggtggatcgcttgaggccaggagttctgagacgagcctgggcaacatggcaaaaccccatctctactaacaatacaaaaattagccaggaatggtggtgtgcgcctgtaatcccagctactggggtggctaaggcaggagaattgcttgaacccaggaggcagaggctgcagtgagccaagatcacgtcactgtactccagcctgggcaacagagtgagactcttgtctcaaaacaaacaaaaaaaaacacactacaaacccattttgcttctcatgaattgaaaatcattatatggtgttgtcaggagatcttagactctgtgaaaggcattttccagagagttgccgaaaattagaagggtgtgggggcgctgaaatgcctaggcagagaagataggtttgatatagtaaagagtaaggagtcaccaaagtgtcttagcaaggcaatactctaaaaatcatgttttaagaagagattctaccatctttgtccaaggtgtgtgtgttcatagagaaaacctagcctcccaaaacaagcaaggaaaatcatggattatgaaaggatctttctactaaaagagtcattattacttctctattttgcaaactctctcagtaccttcagaatatttacagccttccaaaatgtaatgtatacccttctcaggactatgcataatgcagttcacttaagaattgtgctatgttttacatagactgacaggttcttgttcaaattctttgtgataacatcttttcattttcttttcttttttgggtagttttaaatacattttcctttttaagaaggctaggatgtttggggggaaaaatccttgtactttttgtaagccacttataacacagattaacttcacagcacataaaaagaatactggagaacccttacatgattaaatatgcccctagaggattaagtttttccacatatttttaagccagtgctattaataatgttccagcattaaactttctgtacatcctcattatggaggaggcctttttttgtttttttcattctgcccttgctgttagtttttccgtggtcagatatgtagcactataaaattatctgtggaaacatacaatctgaatgtttaactggagtctaacaaagtatcatgtctggggctcttccaatttttattcaaagatgttgtcaatttttcaaacttaattgttcttttgtcttactggaaacctggcagaagatggctatttacaggcatatcttagattatggggcagaccaccacaatgcagctaatattgcagtaaatcaagtctcacaattcctttggtttctcagtgcatataaaagttacatttttactatactgtagtctattaagtgtgcaatagcattatgtctaaaaatacatgcataccttaagtaatacaaaatactttttttttttttttttttttgagacagagtctcacttgttgcccaggctggagtgcaatggcgcgatctcggctcactgcaagctctgcttcctgggttcatgccattctcctgcctcagcctcctgagtagctgggactacaggtgtatgccaccttgtccggctaattttttgtatttttagtagagatggggtttcaccgtgttagccaggatggtctcaatctcctgacctcgtgatccgcctgcctcagcctcccaaagtgctgggattacaggcgtgagccaccacgcctggccacaaaatactttttttttgctaaaaaatgctaacaatattgagctttcagcaagttgtaatctttttgctggtggaggttcttgcattgatattgatggtggccacctgatcagggtggtagttgccaaaggttggggtggctgtggcattttcttagaaaaagacaagtttgttgcagcagttggcttttcctttcagaagatattcctctgtagcatgcagtgctgtttgatagcattttacccacagcagaacgtctttaaaaattggagttgtcctctcaaatgctgctgccactttatcaacatgatgttctaaatctttagttgtcatttcaacaatgttcacagcatcttcatcaggaatagattccatctagaaaccactctctttgcttacctgtaagaagcaactcctcatctgttcaagtttgatcctgagattgcagcaattcagtcacatcttcaggctccacttttagttcccttgattttttcaccacacctacagtgacttcctcttgaacccctcaaagtcatccatgagggttggaatcaacttctttcaaactccttttgatgttgatattttgacctccttccatgaatcacgaatactcgtatctagaatggtgaatcctttccagaaggtttttaatttgctttgatcagatccatcagagaaatcaccctgtatggcagctattgccttattaaatgtattttttaaataataagacttggaagtcaaaattactccttggcacaagggctgcagaaatggatattgtcttagcatgcatgaaaacaacatttatctctttgtacatctccatcagacctcctgggtgaccaggtgcattgtcagtgagcagtaatattttgaaaggaacctttttttctgagcagtaggtctcaacagtgggcttaagatattcagtaaactgtgccgtaaacagatgtgctgttacccagattttgttgtttcggttatagagcacaggcagagaagatttagcataatttttaagggccctaggatttttagaatggtcagtaagcattggcttcaacttaaaagtcaccagctgttttggtcttgaccaagggagtcagcctattttttgaagctttaaagccaggcattgacttctcctctgtagctacgaaagtcctaggtggcatcttcttccactagaagacggtttcatctatgttaaaaatctgttgtttagccacatttctcaattttctgagctagatctcataataacatgttgcagcttctacatcagtacttgctgcttcgcctctcacttttatgttatggagacagcttctttccttaaacctcattagccaacctctgctagcttccagctgtgcctctgtagcctccttacctctctcagccttcatagaagtaaagggacttttagctttgctctggattgggctttgccttaaggggatattgtggctggtttgatcttccagatcactaaaactttctctgtagctcttttactttatttttgtgtgttcattggagtagcacttataatttccttctagaactttcccttggcattaacaacttggctgtttggtgcaagaggtttagcttttttttagcatgtctcagcttttgacatgccttcctcactatgcttaatcatttctagctttttttttttttttttttttttttttttggagacagagtctcactccgttgcccaggctggagtgcagtgtggcgcaatctcagctcactgcaacgtccgcctcctgggtttaagtgattctcttgcctcagcttcccaggtagctgggattacaggcgtgcgccactatgcccagctaatgtttgtatttttaatagagacggggtttcaccatgttggccaggctggtcttgaacttctgacctcaagtgatccacccaccttggcctctcaaagtgctgggattacaaataggcatgagccaccgggcttggcctatttctagctctcgatttaaagtgagaaatgtgtgactcttcctttcacttggacactttgaggccgttgtaattggcctacattcagtattgttttgttgcaggaaataggcccaaagagagggagagagatggaggaatggccagttggtgaatcggtcagaacacatactacatttatctattaaggtcgccatcttatataggtacagtttgtggtgccccaaaacaattacaatagtaacatcaaagaccactgatcacagatcaccacaacagatataataataatgaaaaagtttgaaatattgtgagaattaccaaaatgtgacagagacacgaagtgagcacatggtgttggaaaaatggtattgattcctttgctcaatgcggggttgccacaactttcaatttttttttcttttgtaatcactaaacacatagtactcaacatttcaaaaaagatcacttaatttcagtggacattttttcctgacgtaacattctggtttataaggaatcttgttattactgaggaattgagttatttattaaatgccttttttttttccagggggttaggctgtcaaattaatttcccatggctaatcagcctgggcttgactctacgcacgtaatggtcctacactcccccagctctctaggacttgcagtctctctgatcctaacagcctgcaggtcttttcttaccagccaggactctttcccagtcccttcagtggtgctcaccagcccctcagtttctctgaccttaaccttttgatccttattctgccagtcccttggcttagatgggttcttaatttcttttctccccaaatttgtatttttctgtcctgaccagaggcgtcagattgttccacactgtttaaatgtgccagtcaacctctcttctccgactctctgcacagctgggcctcagggtcaccactcttctcaagccccatagtctaacccttctcgggtcacagaggacttcctgccagctatctagaccctagagctcccctgcctcccgtcgcctggtcctttcgcttttcactgctgcagctttgctcaaccttccctcctcattcctgcccctgggggagagctgcccctcctttccagtgccaacctcttcatcagtgctttagagttctgcctcagcactaaacaaaaacaaaaaccaactaaagattttagtatttttatattaatatttaaaattgtctaattttaataaatgttaaataacatttggttttaagaaatattaaatattcaatgttaaataatattgtttattaacattaaataaaggtgggaggatcacctgaacccaggaggttgaggctgcagtaagctgtaattgtgccattgcactccagcctaggtgacagagcgagactgtcaccaacaacaacaaaaaaaacactgattgcagcaacaaaagttagaaagcactaccctttaacagagagctgattaaattatggtgtatttattatcggtggcaattaaataattttaattttaataaatattaatttttaatattaaatatttaaaaatcttattttaataaatattgaataattattaagtaacacatgcacatggatttaaaagttaaagtagtataaaataatctacagaggctactatttgatgtcagtttgtgtgtatttgcattctgccagagatattcttccatagatgatacatgcataaacaagtatgtacatccatgcatttcttcttcttcctgtctcctccttccactctttttgaacacaaatactatctatacacagtctagatattgctttttaaatatattgctatgttttggaaaacaatttgtgtcagtactatagacctgcctcattcttttaatggatgcaaaatatcccttttttttgtttttgaagactctgtcacccaggttggagtgcagtggtgtgatcataactagttgcagcctcaacctcctgagttcaggtgatcctcccactttagcttcccaagtagctggaattacaggtgcactccaccatgcctggctaatttttaagtttttttgtggagacaaggtctcactatgttgcccaggttggtcctgaactcctaagctcaagcagtcctcctgccttggccacccaaaatgctaggattacaggcatgagccatcgtgcctggcccaaacagtgtttcagtaagcatccttacaacataagtctttgtgcccatgtacagctttatcattatgaagtcttaaaagtggaattgctagattaaagggtgcctgcattttcatcttctgaaaagaaaaaaaatctatttcttgtataattactgttctggtctgtttatgcattgttgatttcttagatatgtcttcaatgtctgctatctttttaaagcattcatctctttatttcttgtgagttcccagagaatttctgaggcattctggttcagcgttctacgtttcacagtccctgtgatcactgaattcctaaatgtgatactcattgtttctaagaactctttactgttctcctagtctcctctcaagtgtataggccttttatttcttaactttctatgtaaggataacatatatccaaaaaaaacacataagtcttctgttcaacttaatgaattctcaagaagtacaccttatgtaaccaatgcttagataaataaattattgccagcaccttggaatgtcccttgtgccccttacagtctctctgtgggtagccactatcttttctcctaacaccacagattcatgttgcctatttcattttaattttatataaatgtaattgtacagtacatactgcttctttcttttgtgtaacattatgtttgaaggtagtttgttctcactgatatatagtattccattgcatgactataccacaatccatttgttcattctactgttgatggtcacctcaatggtttctagttttgggctatcatgaatagcgctgctgtggacacttttgtttgtgtcttctggtgcacatatgtacacatttttgttgggtgtatatacacatagagtagaattgctgcatcatagggcatagagtcctggttgttccacatccttgccagcacttggtattttctttgtcattttagtctttttgataggtgcaaagtagtgtttcattgtggtttcagttttcatatcaactactcatgccatggagcccattttcatgtttattggctctttggatatcctcttttgtgaagtacctattgaaatttatttttccattttaaaattatttttaaaaatatatttggctagctcgtatgtcacacttttttgacaaaatcctttttctcctcccttctcatttatccttttaaatttattttcttggcttttctctcacctgttcttttctaaccactgaactttagagccactaactactcctaacttttctagaatttttagtgaatttgcatgaaacttactttgagaaaacattggtactcaaactggaagataatgttattgttattctaagaagggaaaagatgataaatactaagccgtactagttttttggccactagattgcattattatccccatgtttaattctcattttaattttatttttgacaagagcttgttagaagtgaaagtcttttaatttgcattttaagtctggagactcctttttaaaaaatgtaaatgttttacaggttcttgatcaatatgaacgagaaggatttaacttcctagccaaggtgtttaattcttcacattccttcttagaagacttgactggtcttacattgctgcatcaagaaacccaagctgctgaggtaagaacaaaacaagctttctgtagtgaagactgacatgcttaaaactatttgatattcgccatatggaaaaggaagaaagcaattaattttaatttttgtaacttagagcaaatatcactaaataagtctgctagttaccagagaacgaataaccctcagcaagtgctggatactgatgtgtgtaggttgctgtccagtaggtgcctaatacacaaaatcagtgtgataaaggaagtataggttgtagatttccaggcacctcttgtccttactgaagatctgcatgtgtatgaccattggagagagttggctttaatgtccatatatcaaaatgtaagttggtaaagacattggactccagctatgttctttagaaagaaggtattggactctggccatgttcttcagaaagaacatgcctggctttttcacgatttgatcagtcttcttagaccctgaaccccaccatgaaatggcttccccagacacaacccgagagagttatgctttgtttctcagctaaaatattttgcagatcttaatttcctgggtcattgcatcattttttttttttttttaaagactgagtttaagaaataaattatcggccgggcgaggtggctcatgcctataatccaagcactttgagaggccaaggtgggtgggtcacaaggtcaggagtttgagaccagcctggccaacatagtgaaaccgtgtcttcactaaaataaaaaaattaggtgggcatggtggcaggcacgtgtaatcccagccactcgggaggctgaggcaggagaattgcttgaatcctggaggcagaggttgcaatgagccgagattgtgccactgcactccagtccgggcgacggtgcgagactccgtctcaaaaaaaaaaaaaaaaattattgtgtttttccaaatgctcgctgttcttagaaaagggaatgctgtgtatggtggtagagctatttggatcacttggcaaaatgtgcaattcctcagaattgatgagtgagattaaatcaatcttttccccttagttacctggataaagaagccatgaggagaaatgtagcttatgttgtgtttccacaaactatataaggaaaaccttgacttcctgtgtcctgcaggggtagtgcacttgccattagtccttttaagttgcaattcttcccaccagctaaagagaaatatataaattatttctagctaggtggcaaaactcccccagccatcttgtcaaatgattgcatgggtgcaaagatctataaattcctccataggttgcatatcctcaccattcagggaggccccaagttgtcaatgaatagatggccaggcccaatactggaccagccagtggtgaaagggctgctgtttggagaggtggagctagtgctgagtataggaagaccatgtagaaataccaaagtcagacccattggaggtttgagcagattgtgagatttttcaggtacaccagggaggcaagatagtacatctctagtgctggacttaaactgaaggcagtccttctttaaattgttttggtgccctctgggcattaaacagatgcagtcttccacttatggccaatagttagagccacaaagagtctatttcaagtttcaggagatgaatggcatctctgctgctctttgagagactttaaggtatttttcccctgaattgtgattgggttcccaggcagggttcagaacattgtgtttattgtctgccgtattatcttttaagcaatgctgtactgcctgatggtatggaagaggtaacatagatgtttgtaaacatacagtcatttgatggctaaggaagttttgccacccagctagaagtaacttatgtattgttagctagaagaatttcaacctgaaattgacccaatttttcactctttaaaacagagcagttgctagaatagtgggtaggtttctagatttaacctggtttatcttacattttagttggtcaaaccttaatggctttttcaaagacttagagaaagtttaaaagcaatagtgactaaatagatggtggagcagaagggagcatggtttcatccacgagcctgagttttctttttgaattttcctctactaaattatatctttagttttggaatcatacgtcacatcaaattttagattagagatggtaaactgtttggcctgtgagccagatacggcttgcaggtatgtattttttggcctgcccagtttgttaaattctgaataaagccatcatttaaaaaccacaagttttaggcggggcgtggtggctcacagctgtaatcctagcactttgggaggccgaggggggcagatcacctgaggtcaggagtttgagaccagcctggccaacatggtgaaaccccgtctctactaaaaatgcaaaaattagtcgggcatggtggcacatgcctgtaatcccagttactcgggaggctgaggcaggagagtgacttgaacccgggaagcaaaggttgcagtgaaccaagatggcgccactgcactccagcctgggcgacagagcgagactccatctcaaaaaaaaaatcacaagagggtctgaattttcccatttccaactttgaaaaatcagatctgggaactccagacatgcatctcttaatagtgatggttagctagagccaagaagcaaagtttatagataatgcacttgatataaaatttaaaggtattacgaaatactctgggctgggcatggtggctcatgcctctaatcctagcactttgggaggccaaggctggtggagtgcctgagctcaggagtttgagaccagcctgggcaacacggcgaaacctcatctctactaaaaatacaaaatctagcccggtgtggcaatgtgcgcctgtagtcccagctactctgggatgaggcaggaaaattgcttgaaccagggaggcagaggttgcagtgagctgaaatcgcgcgactgaattccagcctgggcgacagagcgagactctgtctcaggaaaaaaaaaaaaaaaaaaaattctgtgaaaaggatatcttccttctatacaggtcccttagctcctcagttcctttcctggagacaaacactgttgttactttcctgcccagagatattctttaggttatattctttatttagatgatgccctttagtaggtgacccttaataggtatttgagcttataacccgtcttcaaaaaggatcattatttttcttaactctgaataggactgtgttttaagataaggtttgaaatatagtacttagtagaggacctcctagcaacaaaaattactgttctaactacatcattttctattactttgaaaaatgtgtgtatgcgcatataagcaaaatatataaatatatgttaaaatatatatatacctttacgtatatctgtgtaaaagtagtgttttgatttacatacttgattctcaatgcgtttacaggtggtcagtaataaaaacacagaattctgcattctacgtagaaaggtctccacttatttattttagcaacacaatcaagatgctaaattaattctcattttgggttaactatttacatcaatcaacattggaattgcaaacgattcaactagataattatatgtgacattaccattatatactttgtttataaaatacgtgtttaaaaaatatactgaacatcttttgaaaatctgataccaagcactgtgctagtaactgaatacagaagttaatgagacactgaccctcaagggctcatagtctagtgtgagaagctgacatggaaatagtgagctctaatgcaataaaaaatgttttagtcatttgtatattaagtgctgagagagcagttacttctgcctaggggaataggatgtcaagaaaagcttcacaggaagagaacaaatatttcacttagttttaaaggatgagtagactatttttaaaaataaaagttggattttggcagagaaagagtagagaagggaagggcaagaagcctagggcgttctagactgaataaaggtctccgaggccaagtctttagtatattactcaaaatcatgagtagtgtgatgtacttggagccacagttacctgaagtcaacataatgttttttaataatagctttattgagttataattcacataccataaaacacaccattttggctgggcgcagtggctcacgcctgtaatcccagcacttttgggaggccgaggtgggtggatcacttgaggtcaggagtttgagaccagcctagccaacatggcgaaaccttgtctctactaaaaatacaaaattagctgggtgtggtggcatgtgcctgtaatcccagctactcgggaggctgaggcaggagaatcacttgaacccgggaggtggaggctgcagtgagctgagattgtgctgttgcactccagcctgcaagggcggggggaaaaaaacaaccacacacaacacacacacacctttttaaagtgtgcagttcagtggtttttagtatattcacagagttgtgcaaccattaccactctctgtttagaaaattttcatcccccacacccaaaacaaactctgaacctattaaaaggtcactccctgttccctcctccttccagcccctggcaaccactaatcttctttctgtctgtaaggatttttctattctggacacatcacataaatgatcctttgtgtctggcatcttctatttagcacaatgtttttaaggtttattcatgttgtagcaaggtacgcaattgtttttcatttaaagaaaaagtctcaatgctattacaattttccatattctttgcacctgtggtctgtctccctaaatatagcccctttatgaaggaggaatgcaaagctgatccaactagagactacaaattcctttatatttatatagaaaggggcacatagtaatgaattggaagccatatccaagctagaatcatctagatttagtgagattgactagtgcaacccaattttttgcactcatcccctgtccatcaggtacctggaaatgattgcaatgattttgaactaggttactggtataatcatactgctgttgagattagcaggcaaattaccaagttagttttttattggagggggagaggtcaatgtgtgagggtgcatagtggagactggggaccaggctgacaaagatgaattgttttaggtagtgatgactttgaggtaatgggataagtgagtgaaaatgactggttggcgttggagatgggatggagatggagcttggagaaaaagaatagcactagtaaatggatttagctagacaaaggagatttaccctattccatttagcacagtgaggagaggctagacagctaggatgcaataaaaaaaattttaatgagaaatgtgtgtggtagattaattttattaatctcaagttatagattaaaaaatttaagtaccacataaatgccatttgcctttgctaatgttacatttttatgaagaaggagccttgcataagaatgatataatggacttttgggacttgagggagaagcttgggagggggggtaaaggataaaagacatattgggtgctgtgtgtacactgcttgggtgacaagtggactaaaatctcagaaatcaccactaaagaacttatctacataaccaaaaatcacctgtaccccagaaactattgaaataaaaaaaaagaaggggacttggacagatagccgtattctttgccaaattatagttacattctgctcatgggggattaggaggttcaatggaagaaaggccccactcagctttcttccctcttaaaatgttgccttgtaaattagggaattttgcataaagctctgacctttacttccaaggcctttactgagaatgggtttggatacttggagatagatcctgactccctatccctcctagatctttatttatcctatttggaacccagggaaatggccttaaagctgatgaaccacagggtgtccaagtcatggagctattgaggttctccccaagtatcttttaaattgctgcatttgggatgggtacagtggcttacacctgaaatcccagcactttgggaggctaagttgggaggattgcttgggtctgggagtttaaggccagcctgggctagatggtgagcctctgtctctatttaagaaaattagaaattagccaggcatggtgacacaccagctacttataatgctgaggcaggaggatcacttgagcccaggagtttgcggcagacagtgagctatgattgtgccactgtactccagcctgggtgacagagcaagaccctgtctcttatttaaaaaaaaaaaaaaaaaaaaaaaaaagctgcgtttgttgaagaaatgctcagtctaaatcaaacatatgaacaccttagccatgttccacaaaaatttgctgtgacttaccttcttagagttatttctcatcctatgagtagaataagtatcagttcacatgtatttatttgttccaactgtgggttcaacatcatactatgagaaatgccaaaatattttctaactgaatgtaactagagataagactaatttataagagagttaatagaacaagctatattggtatatccctgagaaattcaaattcctaagtccctttacccaatttccctgaaatacttcattcctattcatgaaagtttgcacgttccatgattccaggattaattttaggctgttttacttccttgccttgaccatattgtcagtatttgatgttgtaccatgcagttatgatttcagggttgcaattacagtgcaccattaatataatttgcattttgtcaaggttgtgctaaatagaacttcctttctgcagatttggggattaatgaatgatcatctaaaaagaaagcaacaaccataacataggctataaaatcataaacagaccagcagaaatgaacagggctgagctgattaattggttatgaattaaaatgtagattgtgattcattcactatagaactcagaattctagaaaatgcccatttctctcatagccaaaaagtcatatgaaaaacattacggtcatgtgatatgacttcattggcacagcaatttactattcagcaaagtaaataacacaattaacaagtgtttctgctgggccttttgcacttacactgagattttggcctctcccccacacagctggttttgatttggttcctgtggaatatttttgttttgttttgttttgcatttaacaacagtcagatatttatgtacagcttcatcaagagcctctgatgacaaatatgcctttggaggccagcagaagctgtgggaaacccccgtgtcagcactcagacctgtttccaatggagagaaatcgctctggggactgaactagcctgctcatgaatccagttcccttttcccagagccttctgctagctcacttccaacccatgctggccatcctgggactgtgccctgccttgatttttccttatgaagcaatccctcaagacacagccttggccctctctcctgagtgagggaggaaaggcagaaacaggcagaaagccatttacttcttagattggaaactagagcctggtttttgaaataaagcttggcagtatctcacttataacttactttataaaatgtgtaccttttatttgctgtcagagttatctacatgaatttgagatgtttggataaatcgttattggggaaagttgcaattggaaaatagacaatgaagtctgggcagagttccccacccttcggaaaagagtctcggatggtataatccgcttggagaagtctaagcgagaaagaaggggggaaatcataaatgctgaaagcaaagcaaagacagctaatattaggaaacagaacatgggaatccagtccttcttacattgtactcctggttccgccagtgttctcatgagtgaccttggatgaatccttcagtgtcctgtgcatgcttccccacttaaaatgagaggattgaatcatgtgaaattctttttttaagcctcctttctagaaaaaaatgaaatgcttttcaactctaatttagtgattttgattcaaatataccatgtataaccaaaaaggaaaaagatggataatttttacataaaagtgtttaaaaatatatcaaagtacttactttttatacattttataaatattctttggtatctattatatctagctaccattgccagaaacaactttttgcagattttgagatttacatctactttgagccttaatagaacattgcttatactttgtattgatgtgtgtcactgtacgtataaatctaaaatggtgtaattcagcctaataacttacctccttcaccagactcggtgccacttttgacttctttataaactcaaatccaccctggccataactgggtatgttcatgaaacatgctactcactacccctcagtacagcttccgaagatgagttccaaagccctcttactttaatagcagcatccttagaatgctgaatgtgtaataacaggagagttactttaataatcagccatattacattagaatactcataaagtgtatgagtaacccgaatcctggcctggtcagaaggtctgagttcatacctcagctcccacacatagccaagactgccatgttcctctgtgtgggccgtgtcaggcaggaccgtgtgcagcagtcatgtgagaccttgggttatttacttcattgaccttcgtttccatcattttgtaggatgtgattaataattcctactcctcacaattaccatattaagtaagaaggcaccttacaaaagaaaaatactggactccatcaaaattttaaattttgtgcttcaaaggacataagaatacgaaaaagtgggccacagtataagagagaacagcattttgcaaatcatacctgataagggtgtggtatctagaatatagagggaactctaagctgggtgtggtggcatgtgcctacagtcccagctgcttgggaggctggggtgagtgtatcgtttgagcccaggagctggagaccagcctgggcagcacagtgagaacccatctctaaaaacaacaacaaaacccagaatatatagggaactcttacaacttaataatataaagatacagaactcaattaaaaatgggcattagatttaaaacaacatttctccaaagaagatatacagataatcacatgatagcataatcaaataagatgcccaacatcaatagccattgggacaatacaaattgaaactactgtgagatggcattcatacccagtaagatggctataatcaaaatgacaacatccaatgtttatgaagatgtagggaaattagaagcctcctacctactagtgggagtgtcaaattctgcagccactttggaaaactgtttaacagttccttgaaaaattaaacatagaattaccatgtgacccagggattgtacccctagatatatacccaaggctactctggacaccctgcctatagggtagccctgttccacaaggaacagtaccaaaaattgtatatgtgtgtgtgtgtataaatatagcccagagaaatgaaaatgtgcacacaaaaaatgtacacagtgttcctaacactattatttattcataattgtcaaaaagtggaaacaatgcagatgttcattagctgatgaatggatggataaaatgtcagctattacgctggaataatggagtattcagcaataataaggaagtactaatacatgttatagtatggatgaacattgaaaatgttacactaattgaagaagccagtcacaaaaggacacatattgtaggatctcatttatgtgaaatgtccagagttttaaagtccatatagtcaagaaagtagattaatggttgtcagcaggtggggatgggggattaagggaaaatcagtggctacttaaaatgtttcctttcgaggtgatgaaatgttctaatcttagatagtgatgatggttgcacaacggtgattatactaaaaccattgaattctatactctgaatggatgaatcatatggtgtgtgaattatcaatacagatgtttaaaaagcaagacaaaaagtgcccatagttggggcattttgtttctccttccctctctcctttctctggttctctctgcatgcaatgttgattttctctctgtgacaggctgtcgtaggatgttagctcattgtttttaggaatgcgttttctgtagattatgacaaggatctcttccatttttattgtgcctcagttttcaaagccttagtctctgtgcacctcctttagccttttcttatgctatggatagcctgtaaacactgagggaagagatggaggggcctaccaaccaaatgcctcccctctgtgcttgctgtggggagagaaagccacagttggctccatccatagaagacatcgcagataaaggggttaggggaagatgagagcacgttgctatctgtttgtgtaagtttaagcaggtgtttagaggatctaaatcccaacctggatctgaatttttaaaatttccctgtttaccacaggatttttcccccaagattttttagcttgaaaattcccaaatataccagaaagttgaatgaaaagtacagtgaatacccacatactcctacctggatccaacaattaacattttgccacatgtggtttatctctctgtgtacgtgcatgcactcccccgacgtcttatcacagttcgcatatatacttgctcgttttctcttttaaaccatttgaaagcaagttttatatacagcggcacctcacccctaaattttagcatgaatctgctaagaatatagacattctctgatgtaaacagagtaccatcatcacagaacaacaaagaataattccataataccacctaaaatccagtacatgtccgaattttcccagaaatgtacaggattttaaactattgtttgctttttcctcaagctggtaatattatacttagagttttttccaataatacttaagcactggtcatacataccaagtgatatccacttaagcatatctttttaattcccttgacaccctcacgctcctctctaaatggggagacacaattaccctattaggcaacatgcccctgaggtcctgctgctccagcaggcctcttctaggtgagcgtcttctctgggtgtcaccagggcatcctggtctgattgaagcagccctgagagccaaccagccctgagcagtggttcccacccatcctccatccagggtccccaatggtggaggcttttaaggaggtaggaatgggactatgaaggctattttcaatattttgaaaagtcaaacaggagtaaaacatttaggacttgaaaagattacattgaccaactgaactatcaagattttagccaggcgtggtggcttgtacctgtagtcctagctacttgggaggctgaggtgggaggatcgcttgaacccgggaggtggaggttgcagtgagccaagattgtaccactgtactccagcctgggagacagagggagaccttgtcttaactaaaacaaaacaaaaataaagattttttttctttttaacctaaattctgttgtctcagaatggaatggcatactgttatctgacctggccagaagctctgattggtagttatgaatccctttgaattattaaaaaaattaggcaaattagtgcatttgctgggtaggagaggtttttcaagatctaatatgtgagagagaaagtgaaaactaaaggaattcttggagatcaggaagtggagaatctctggcctgtggcgctgctgagcctaacttcctggcttcacatcagcagtggaggcttccctgggaggtgttcttgcagtttgccctgtgaccgctattctaggggctgtatttttacagctgacccttctcacttgcaaacataacagctgctatgtgttgaatttggggagtttccatattttgagactgtaaaattaaattgatttttagttctgagctcttagtcttattttctttttcttttctttctttctttttttttttttttttgagacagagtctcaccctgttgcacaggctggaatgcagtggcgtgatcttggctcactgcaacctccgtctcccaggttcaagcgattctcctgcctcagcctcccgagtagcagggactacaggcgcccaccaccacgcccggctattttttgtagttttagtagggatggggtttcgccatgttggccaggctggtctcgaactccttacctcaaatgatctgcccgtctcagcctcagaaagtgctgggattacaggtgtgagccactgcaccgggcctgagctcttagtcttgatccatcttgcttctcagctgtaggggagcagggagggaagggaatgtgaaatatcctaaggtgtgtgttttttaaaattaaatattgttgatcttttatcatggcttctatcagtcaacagatatttattgaccctttgctgagttcatggtgtgggagtcaaagaggtacaagccaggcttttaggaggcagacgcagtatagttggggagataggacaggaaagtcactaggactgcaaggcagtgggtgtgcacgtggtgcagtaagttctgcagggtttcaggaacatcaggagcaagagagagctccagggaagagttaggttttgaggtgcgtcttgaaggttggagctccaagtgcaggagagaaaaagctttccagaagggcctgtggcatgaccacatccaagtctctgatgaagagtaccaagagaggtatagcaactaatgttaattgcgttatctgtgattttcagggcgcttttgtacctgcccttttgatgcccataacaatcttaggaggtgactattatcccattttatggatgaagttgtcaagactgtagctatgctcaggatttatctacatcttgaggtttacagtacacttcataaggctggaatcagagaggaagaagtgcatagggtgatgcagaggcattctgctttatagaacatatctctactttcatattgagcagtttccaaaagcggttttgctttttgtctgtgtccttacaactacttctcagatagcatagtttctttcactgtaccatcctggggccttactgtactttcttactcttaaactggcttctaataaaatccgtgggaatgagattttacttgtagatgaacttgcgactccaatcccaacttaccattgggaaaagagcaggtaagagataagtcctttctttctggcctttactctttttttttttttttttttgagacggagtctcgctctgtcgcccaggctggagtgcagtggcgggatctcggctcactgcaagctccgcctcccgggttcacgccattctcctgcctcagcctcccaagtagctgggactacaggcgcccgccactacgcccggctaattttttgtatttttagtagagacggggtttcaccgttttagccgggatggtctcgatctcctgacctcgtgatccgcccgcctcggcctcccaaagtgctgggattacaggcgtgagccaccgcgcccggcctttactcttaatttccctttacaatttagggaagagttggtccccatttgcttttttttttttttttttttttttttgagacggactttcgctcttgtcgcccaggctggagtgcaatggtgcaatcttggctcactgcaacctttgcctcccgggtttaagctattctcctgcctcagcctcccaagcagctgggattacaggcatctgctaccatgcctggctagtttttgtatttttagtagagatggggttttgccatgctggttaggctggtctcaaactcctgacctcaggtgatccacctgcctcggcctcccaaagtgctgagatataggcatgagccactgtgcctggcccccatttgcttttattcagctatctggtgaaaaaaattcagtattaaactagaaatatttatatcttattgttgcaggacaaagttgttgagtttctaataacaaatatgtaaactgctgtgggatatttttgttttgttataatttgctgctagctttcaagcatctgtgtttatcctaccttaatcctctttgaaagaggccatacttaattttacccaatgctttattaaaaggaaagaaagttggatttttaaattttttatttattaattttttgagatggagtctcactctgttgcccaggctggagcgcagtgacatgatctcagcttactgaaacctctgcctccaggtctaagaaattctctacctcaacctcccgaatagctgggattacaggtgcatgccaccacacccagttaatttttttgtatttttagtagagacaaggtttcagcatcttggccaggctggtcttgcactcgtgacctcatgatccacccacctcggcctccgaaagtgctgggattacaggcgtgagtcaccgcaaccagcctgcattatgttttaaagcaccagtttggaaccaatcttttagaggtaactgttacaagtttctgtacccaaatattggtttatctgtactctgtttcttccttcccctttctcctttttttttttttaattttttttttttttgagacagagtcttgctctgttgcccaggctggagtgcaatggcgtgatctcagctcactgcaacctctgcctcccgggttcaagcaattctcctgcctcagcctcccaagaatctgggactacaggcgcctgccaccacacctggctaattttcatatttttagtagacacaggtttcaccatgttggccaagctggtcttgaactcttgacctcaggtgatccacccaccttggcctcccaaagtgctgggattacaggcgtgagccaccgcgcctggcccaatttttgtatttttttataaagatgaggtttcactatgttgcccaggctggtcttgaactcctggcctcaagccattcacctgcttcgacttcacaaagttctgagattacaggtgtgggccatcacacccagactcttctctttctttcaacggtaacctgtggaaatacaatgttatcatccagtaccatgatcgctaggctgaagtaatagtaagccaagctctcttcagcccttagcagtgtgggcccagaaacagggtggtcttatggaagggagcataggatgtgggtcctgaagagaaggtgttcactcctggccccatcgctagttgcatcacttcatcttgcctggatttcatctgtaaaatgggataatgcctactccacaaagttgatgtgctttgaaatctttaatacaaacatttgttattggaaactaaatacaaacgaaccaaatggaaaactagatttttttcataaaaatgtttcgggatatatatcataggcctttgaacgtaaatatcttgaactttaaacaatcattagccattaaaattttaatgtgtattaaatggatattattagactgtcaaagtgattagcaataggtggtttcattgtagaataacctattttaaagtattttagggccaggtgcgtgggattacatgcctgtaatctcagcactttgggagtctgaggtgggaggattgtgtgagactagaagttgaagaccagcttgggcagcatagtgagactccatctctacaaaaaaaaaaaaaaaaaaaaaaaaaaaaaaaattagccaggtttggtggcacatgcctgtagtcccagctacttgggaggctgagatgggaagattgctagagcccaggagttcgaggctgcattgagctaagattgtgccacttcactccagcctgggccacaaagcaagaccttggctgtacaacaaacaaaacaaaaggaaaaacaactatttgattttagtcagggtgtaagaatatgtattattgttcccaaaaaaatctgtgtaaaaacttcatagtgtgaaacagtggcaactgcttgattaaaacatcatttagaaaagacactcttccctgttttgaaattgactcctcaaaaggacagctgaacatggcctcttctccaggtgtcgccatgcactccctctgggccaccatacacacttctgtgtggggcgtgctcccacctccagcctgctcagctgatcttttgttcagcaatgcctgtctacttccccatgagatccacctggcactcctactagtcttaaaccattatctcccttgaaaaatgagttctggctcactccttactactaaggctgaggggcaaaggagattatataaatgaaagcaccatgcatgtttgaggtggtttccttttcttcgttgttgttttttgagacagggtctcaccttgtcacccaggctggagtgcagtggcacaatcttggctcactgcagcctcaaccttccaagctcaagtgatcctcccaacctcatcctcctgagtagctggggccacaggcatgtgtcactatgtctggctaattttttgtatcttagtagagacagggttttgccatgttgcccaggctggtcttgaactcctgggctcaaatgatccacctgcctcagcctcccaaagtgttgggattacaggcctgagtgggattacaggtctgagtcactgcacctggccgaggaggtttgtattattacttgtgaatggaggaataacttgagctttagaaaagttaaagtgacaaagatcaagaaaatttccccccctgcttttttctcttatattttaatatttccaaatgagctataacatatgcagaaaaaagcttaaaacattttatatagagaacaagtatgaattaaacacccaggtcaaaaaatactctcgttgcccttcacccatctcatattttactttctgaccacaggcctagaagtaactagtaactagaaacagtaaacttttcctgtacaacttcagtctggtatatgggtcttaaacaatataattctatttgcctgactttgaatttttcaaacagaattatgctataatatgtagattctttcgtgtcttgttttgcccaatattgtaaaggttacccatttgctgtgcggctaaagttcattttcgttgctatgtagtgtttcataattggatatattgaaatttctcctctacggtagcatttctagtctcagattataatgaagtgtgctgtttggagcattctggtatatatctcctggggttcatgtgcagcatttctctgggtgtttctcaaccttcttttcattatcactcctcctagggggataatttaatgccaacagtttagaatttaattaatactaaagaatagggtttgtcagatagggctgagctttggagagccactaaacactgtcatatctaagatttcttttgcctgccaaagaccaatttttgctcctttgggggtgatatcaccctctttgtgaaggcatactgtaagttatttatctcatactagaattgttgggtcgtagaaaatatgcctcttctggaccatggacttaaatgtaaaacccaaaactattaaaaccctggaagacatccagacatcctggcccttacttctggacataggaacaggcaaaaatttcatgatgatgccaaaaacaattgcaacaaaagcaaaaattgacaaatgggatctaattaaactaaagagcttctgcacagcaaaagaaactatcagtaaatagataatctacagaatgggagaaaattttctcaaactatgcatctgacaaaggtctaatatccagcactacaaggaatttagacaaatttacaaggaaaaaaccccattaaaaagtgggcaaaggacataaacacacacttctaaaagaagacatacatgtggcgaaaaagcatatgttaaaaagctcatcatcactagtcattagagaaatacaaatcaaaaccacagtgaaatacatctcacaccagtcagaacggctattatgaaaaagtcaaacaatagatgctggcgaggttgtggtgaaaaaggaacgcttatacactattggtggaagtgtaaattagttaaatcgttgtagaaagcagtgtggagattcttcaaagacctataaacagaaataccatttgacccagcaatcccattactgggtatatacccaaaggaatataaatcattctgccataaagacacgtgcacacagatgttcactgcagcactattcacaatagcgaagacatagaatcaacttaaatgcccatcagtggtagactggataaagaaaatgtagtacatatacaccatggaatactatgcagccataaaaaagaagatcatggatggagctggaggcctttatccttacaaactcatcgaggagcagaaaacctaataccatatgttatcacttataagtgggagctgaatcatgagaacacatggacacatgggaacaacacacactagggtctggtggaggatggagggtgggaggaggaagaggatcaggaaaaataactaatgggcaccaggcctaatacctgggtgatgaaataatctgtacgacaagtccccatgtcatgggtttacctatataataagcctgcacatatacccctgaacttacaagtttcaaaaaaagaaaatatgcatcttcaattttattaaatcatgactgttttccaaagcagttcactgacttacatgaataccagtagtatatggtagtttctgtggtcccttatccttgccagaatcttggtactgtcacattttaaaatttttgccaatctgtataacagtatcatattaggcttttactttgcattttcctgatcactgatgatgttaaacgtcttatgtatattacttatttggattcttcttttctgatagtttctctacttcaactccaaaaattttcatatgttatgcttgtgtagcccctgtgaaaagaaagcacagtaggatgacctagttattcacttgaaaagtatgatggagcccagcgacctttgttctaatcccagatgtttgacttggtcagagtcccacacctctggccctcagcatcctcatttgctaaataaaagtattggctgggttagagcagcagttctgaaccttggctgcccatcagaattatctaggatgctttaaaaaaatgtttagaccacatctgcaccagaaagcctgattaaattggattaaaggttactatatccatttcaacattctgtgataacgatagaataagtctttaacacctagatttcatggtttcaatcatcttccttgtctgcaccctgaattaagtatgccagagactctttatttgtaagactataatctacttttgtaaatgcgttatataaaggaggagactccttaatttagtccgtaggggaaacttggcgtcatcattcaaaatactttattgtatctggtttacttttagcactaagaagattttcttacattgatacctactgtgacaaaacacacatccaatgacagtgttaaaatgtcataaatgagcctttaaaagaatgaggcacatgatacatcatggtacttgagcagactgcaagcctgaccagactgaattcatgaattcctgacttttgacttcttcctgtaagatgctaccccactgccagggactcaacctctaaatccagtcaaggggctacttgggcctggaaccaaggcacagtcaaggtgaaccagctatgctccagggggaggtggttgaaatcactggtctcctggactgggccatgagtgatggttattggggctggggaggtatgagagacatcgtgttgtccatctacctctgtgtatcttcaaaggtctctgtaataaaaagttttctgaaatttactgcctgacatcaagtcagtggtgttttttagtgtccgtctgtcacatgtaaccatatcacatgtgatcagtatctgacacttgggtggcaccttgtctttttcagagggcatttacttgcatttactcacttgatcatcatagcagtcattttcagtgaaaaaccttttgtagccatccataccctggttacaagtgatagaaaccaaaagcttgaactctttttagcataaaagagtaatttattggctggacacagtggcttacgcctgtaatcccagcactttgggaggctgaggcgggtggatcatgaggtcaggaattcgagaccagcctggccaacatggtgaaaccccatctctactaaaaatatagaaaaaattagcctggtgtggtggcaggcatctgtaatcccaactactcaggaggctgcaacaggagaatcacttgaacctgggaggtggaggttgcagtgagccgagatcacaccattgcactccagcccgggcaacagtgcaagactccgtctcagggaaaaaaaaaaaaaaagtaatttattgcttaatgaaaccaggtcatgaaatctgggcttcaaggactctagatgggggcatttagtgtcaagaccatcttagtgttcatcagctctgttctttgttggctttattctctctcactaccaacaagttcttttcttccccatatagcaagaaacatggactcgggcagttccaaaatctcattcttacattaagaaatctttcctagtggctccaaaaagaaaatcccagataaggactgtgattggccaggcctgggtcacatgccatctctggacagctggcagtagaaagggaagggctgccatgattggccagcctgggccaggggcaggtcatactgattggcagcctccctcagaactacacggttggagtgatgggggatggtcctcctcaacaaactgatgcagatggatgggtgttgggcatatatgatagaagtccattgtaagttcagtctcctcttagttctattcctgtgtctgttcctgtcccttccaaacaatgctgcttttctatcagcaattcattattaaggagttgagtgaaagtcatgaaattccagtccccagatttgtccccaagcttgactcactctgctttctggatttacccccatcttctcacctaaccacagataccagaaaagaagtctttattcactgaggctttgaaaaaattagctgcacagtcttccttaccaccacctccaaacaaagaactttctctgagattggagcacagtgcctcctcctttctccttgctacacagaagcctcattctaggcttttcctccttccaggctcctccatgctctcctgaggccacctcttggggcggggaaggggagtgctctctctggctgcttctgctcacccagggtggactcaggagctggagcccctgaggtcagcatgaggcttcatctctcagcccagatggccaggctcagtgacagcatctctgcttcaggacatgtgcctttagtctcctccatagtctaaaaacttacttgccgtgctgaaacttgttgataaaaccaaatctgtaatcaggaacataaaccaacacaatacaggccttgcacaaatgagcagttgtggggtatcatgggcccctgtggattatttgactgaagagaatgatggaggcaaagctggttgttgttgaacaaattgctgccagatgtagatttcaataaacaccacactgttgttcccctgcccgaaggtgctatgaatttcttgaggcaacagaggcatcagtaaacggggcagtggggtgggtaagggggtcgctgttccaatatgaatggagcctcctagtgttttctgtccctggatgtttgtccacagaatccaaggcaggccctgggggtctctctcccctgcctgacattttacaccagagtaatatacttaaactgtagcaaccagactctgtggaacctaaaagaaacctggaattagggtaaaaatgtcacacaaagtctgtattgagggttaactgtaagacatgatgaacaaagcacatcatccttcccttcattgaacttacaaatgggagggagatgagtgctaaagcagtaattacaaataaataacagacaagccttcaaacatcctgtgaaggaatgcagcgtgagcttgtaatgcagaggccactgtctctgccttcaccatctgctaactaataagctaggtgggccaaaatatgagcctattagctgggcatgatggctcatgcctgtagtcccagctattcaggaggctggggtgggaggattgcttgagtccagaagtttgaggctgcagtgagctatgattgccactgcactccagcctgggtgatggaacaagaccccatctcttaaaccaacaacaacaaaaaaccctgagatttggggcctgtaaggccccagagtcttcactacccttggtggctgtacttttaagggaatgaaaaggagagagagattgagattgagactgagagggtgagagagagtatgattggttttagttagtatacaaagaagcttctcatgttccatacaatggagtgattctagagagaatgattttcccgacccttcccttgggttatggctcgctaaatcaagcatcagatgaacgcttggcataaatctaacgtgtgtatttggatcaccagagaactatgtggttttctaatcccgttgtcccagttagatgcaaagcttctggaggacaagggccacacctttccccctttgtgccctcaaacactaacaggcgctttgccatagtacttggaaaaatatatattagttgaatgataggacaaaaaagcggttgtagatggaaaacgcattaactgctgagaacacgttttcattttgagttgtctataagagtttaaggggcagggaagccctggagttgaagtaaattcaacagcatcaagttttgtgtttggccctcaataaactagtctctctgtacccctggcagggggtgggaggagtcctgggggagctcccttccaaatcttacagggtggtctgtttcttctttggataataatgatgtaatggctagtctcttgagaacttgctgtgttccatacattgtactaagcatttatttggattatctcattaaatcttcacaatcactttatttaacagatggagaaattaaggcacatggaacctaagtgttcaaggtcatggagccagtaagtgttagagccaagtcgtttggctccagagcctgtgttcttaactactactttgtagtgtctttcttacatattagttgggcctgtgtattgctagttgaattcctcttcccagtggcaggccttcacgtgtttgaccatggttttcatgttctccaaacctcagttctctagatttgtactttggtaggtcatcattttccacagatcctacctctttaggtcagaaaatcttgccagtttataaagattctctgggactaactcccacaaagcaaggtcacaagagatcaatgtacaaatgaagcagttcagtgagttttgtctaccattctccataagtacatgggagacaactgatgattggaaggtttggtgttcacctcatggagctgtgatatctcactcaccacacagatctgctcttctgagggaccatcttgccaatttccagagagttgcagggatattaaatttttgcacattaagcttcctctttccaagctgcacatgggccctgctaccgtttgtgaacagtcttctagagtgatataggttctagctttcttagttaagatcgtattttctgataccactcccttgtcactttgcctgaaatgagaaactcccaacctcaactgcttttctagtctcttccaatgaatgccttccaaagggctggtgtcctccagggtgtattagttgttactaatttcatcctccaaggctgatctgattttcaagatctgtagagagaccttagtatattgccttgcctgtaccaaatacagtcattatggcacaggaaaatctcaaataccttattggaaacccaggacaaatatttatttgaccttaatgaaatgaaaaagacattggatgcatacatttaaagaaaacccaaaactttggaatctttaccaaggagggtatcttttgaaaaggacaggctggaacaagaacttgataaaatagaagtaaaggttgacacttttttttttttttttttgagatctatatcactctgtcacccaggctggagtgtagtggcatgatcttggctcactgaaacctcggcctcctgggtacaagtgattctcatgcctcagcctcctgagtagctggcactataggcatatgccaccatgcccagctaatttttgtatttttagtagagacagggttttaccatgttggctagctggtcctgacctcctggcctcaagtgatccacccgacttggcctcccaaagtgaaagtcggcattactagccctgttcagcacatgagacagggcactggatggtgtctacctaatgattttcaacccaggggcccttggcccaagcgtatcactggtataaagggcctctgccagctaatgtgagggtgagtgtggctgttgtgtccatgagagaactcctgggagttctacactcagcaaacgtttgttgttggactatgaaggcggacacagattttatacgaatttgtaatgctaacatctagcataagaattggcaaccatagaaaatattacgtgtatatatatgtttatagtctcaaaaaaaaaaaaaacaaattaaaaaaaccccaggctgccctgtctctctctatctctctctctatatatatatacgcctttacatacacacacacacacagacacacacacacacagacacacacacacacacatatacatatctcttaaatgagattctatttttgtgaagtgttcagaatagacaatccatagaaacataaaaacagattcatggtcaccagggacttggggggttggggggttgtgggagggaaatagggagagactactaatgggtactgggcttctttttgggataatgagaatgttctggagccaggtgtggtgcctcacatctgtaatcccagtactttgagaggctgaggcaggcagattaccctgaggtcaggcattcaagaccagcctggccaacacagtgaaaccctgtctgtactaaaaatacaaaaactagctgggcatggtggcacatgcctgtaatcccagctacttgggaggctgaggcaggagaatcacttgaacccaggaggtggaggttgcagtgagccatgatcacgccactacaccccagtctgggcgacagagcgagaacctgtctcaaaaaaaaaaaaaaaaaaaaaaaaggaaatgttctggaattagatagtggtgatggtttacacagctgtgaacatattaaaagccattgaactgttaaattggtgaattcatgctacgtgaattatatctcaataaagctgttactttaaaaatgaacaagaaagtaaaacccataaaaaggtcctctaggcacttcagcaaacagcgtggtagggaaaagaccaaggagttcttagccctggaggaatggaaaaccagttaacatggtttattcacccaggcctgagatccataatgaaggccatttttaaagttgagtcaccacaggcttgaagactggttaggattggggaactgagggttagagagtaaagtagaagggatggcacttttcttgataggagataattattgcagatattagtgttaagacctattctttttagtatttttttaaacacaaagtaacacctccatgttaccagcaatatttcacatttcaccagtgttcactaagcacctattgtgtgccagttcctatctgctggaagtgcacgattccgtgggctgtagcgagcacagtagcagtccattgggcccaattactgctgacctgagcaatctgttaaaacccggaaagggtattggaagcagacagtccttcctttcttaccaagcctggagaatctacagctctgtccaccacgcctttagagaggcacacccaaattggaagattgtacagtaaaaagagggaatgtccagttcaatgttgagggggctgagagttctctgggttccccaggtggagaacagacggggggcgtgggccttgccatgtggtctgagcactgaatgtcctgaaagtgtggaaaggcctgtccccaagctttagtaactttttttccacctagaagcaagccaagtagtttcagagtaattctcagggtaatccagagccatcttcatgaaagataatactagaaaactcagagggataaaaggatatgcttgctaagaagattatttcccgccgtggctgtccctgcaagccaacaatagcacacccttcgtcaggatgtaacgagtgagagagaacagctagaaaagggtggagaagtaggcgggaggaagctatttaaaagaccctaaagtgctgcagctgttttggctaatttttctcatctcagtgatgttccaagctctttgtcttctatgtggggcgacatcatttagctctcttatgagtcatccttcccacaaataatctctcttggagtagcccttatgaaaacagacaattcacattgcattgtgtgaattggcaattgtgtgtcccttccctgggtgggccatcctgcgtctgcctgcatccacacatgtaggacttctaaggcctgagcaaaccctcagtgatgggggagtgcaaggggtgggggggacatctggagcctgaagcaggcatggaaagccaccaacagtgtgccctggtcagctgactgctccatcttaaaggtttctggataccgtagttgttacctttcctcacaagggttttatgagaattatctaggaaaaagcagacatcagaggaaattccgtgtaaataaatgtgactgccacttcaaacctcaatcttgctaaactgagcttttctttttagatagtcttttcttctgtctggctagcaggtctgaccagcattttaattaaggcttccctagagagacactgagctctttaagatagaaactagactgggtatctgctggtttttctgcctaggaaaatgtactctaatgggtaccttgatttttacccagagaagcccagggtctcactctcatcccatgtttttctggtggagttgactccgcccttggcccatggttggggcaaggtagttgggaccccaggcaatcagcacatcgtgtttccctggccaaaatgcttgggtcagaaatgggcacatgacccaatcttaaccaatgaggtatgatgaaactttggctaagaggctgcgattagaatttggaatttgacggcatgagtctgggctggggcagccttctagtgattgtgagtggagagccagtttgagtatggagaccacacatggaagagagctgagcctggctgggctgagagagcaagaggatggtcatggtattgttctctaagcccagaaccaggcttccctgaaggtaccattatcccggtctttctgggcatatgaggccacatttcccttttagcttgagtaaataaaggttgagatttctgtcccttgcaaccacaagttctgacttgttcaggggcagcgtttcaatctacctaacatctagcagaatgcctggcaggtagaaggaagctcagtgtgtgtttactgaatagattctcattgagttaaacagatgttcatcaaatgctaatgaggttaatggctaccatattggatgatacagatatagaacacttccatcattacagaaaggtctataggatagcactactatagagaggacaaactcaaaccctgcctcccagaagctctatttttgagggtttttaaaatattatcaaaactagatagcataacatatggaaagatagcctgacttactgatttataaaagttcagctttatttctctcgagtacagttatttacatataaattctaatgaaggagtttaacaacaattactatacagatagagtcacacattatacaaagtaaggtatgcctaaatattcttttacatatgaggaactggaatttactgggcctagaaactaaagcagtgtagaatgccttgttgattttttgcagccttttcatgaagcaagttattgattttaagtagaacttaactacagtagtaaagtcctaaaatttctcacagaacctattccatgtccttacccagtaagactagcacttgccacccagaatgatgacaattctagaataatgtggtttagagtagtcagtttctgcaggtgattcctggacatcccagtgcacctgttctgcttttgctggtccacatttggtggtccactcatacctccttcagagtagggcatctgagcctattctggcctccagcatactcattttgtataaaagccatccctgtgtacaattccttcttccggtgacatccatttttcctaaaagtgatgtgagaacaactgatcgtgagcttgtccatgtattgttccttgttggcctgaaaaccaggagcacttgtaaggctgaatggattctgcccagaccggggctgtcttaacccctcagagttagcccgagctggccacaactacatcttcagcctaatatctttagttctacagttatggatcccaccttaatcaagctgatttactcactgtcccagagcacctctgaccttgggctcacacccttccctactcatcaaccccacagatggttaattacttctcaaaacttacctcaaatacctaacctgtcttatgttctttcaaaccatctaagccagaaattctgtatcccttctttgaaccccgatggcattgtctatattcttgttttgttgtagtagctttatttagatgtaattcatatgccctacaactcactcttcaaaaatatacagttcaataattttttttaatattcagagttgtgtaaccgtcattgtctgtttagaatatttcatcacccccaaaggaaaccctgctaaagagcagtcatctctcagttcccctcacaccaccctctggccccctaaccctgagcgatgactaatctttcgtctcttcggatttgcgtgttctgaacatctcatataaatggaatcctgtaatatatgggctcttgtgactggcatcttccacttaacatgctttcatggttcatgcatgttgtagcattatcagaacttcattcctttttaaggccaagtcatattccattgtaggatctgccacatattgtttatggattcatcagttggtaggcatctggattgtttccacttttttgctgttatgaattatgctgctgtgaacattcgtgtacaagttgttgtatgaagtacacgtttttgttgttttgggtatatgcctaggagtggaattgctgtattgtgtcgtaacttttttgttctattcttttggcaatatgatatattctgatacttaaacccatggtgtttcgcttaacactaatacaccttgcctcccctaggaaatataaacccttgagagctgaaaagaagccttatttctttctactccccccactaccgaccactgtgtctaacaaaagccacaattactgtttggactcaaaaatgtgacggaaagaagtagacacttgtgaagtttttttcctctctttctactttaaccctaaactgtgtcacattttttcgcgttcacactgtatgtgtacccttttctgaaagtgcttgtcctctctgaggccccagtattggaggctactggatgtgtaagtagttggtatacagcacctctcaggtgtgaccattccaagggaggagatcagcttccagcatgtctcctccagacaacaatacacactgtcctcctgctgaacagtcagttgtggagtaataatgcacctctgcaaggctttgcagggtttttactcatgtatcaccaaggatgaaaatggggcaggacacagtagaagccgttaaaaggaaattatgtcttcttgccttttctcccttgatcagaccctaagaaaacagcttacccaaatgagcggaaagatgccaggtttataaaatggagtctagcagctgtctttggttctaccttgggatgaggttagaagtattgtttcccaaactcttgcggcgggaagatctgtactaggtgggactgccggtaaatcactggggaggagaagcagctgctgtgaactgagtggtgtggcaactctggcttttgattccccagcagcagatggcaactttgagtaatgacacacacaagatagaggctgtgcttccttatctgaaatgggaatttcaagtgaaagataactggagtctcttcttggggcataattgatctttcatgagccattatccagggtttttacagtacctacaaaaattgttctgtacccaggagttcaataaacactaaatgtgtgaaagaatttgcattctttgcctccggatcagggggaaacatttccggaacatacattaagaacttcaaattgcatagcatttagtaggcacaaagtgactatactagttaaggggtgacagatcaatttcaatttgtgtgcccctcgcttatgggtgtttggagggttgtgttgggaaggattgctgaggccagttaataaataaattaatacattggttatgtctgtcatgaacacctaagagactgtgcagtggtagcgcttgtgttgaatattttccctagaccttgagctccttgaagggcaaggactgtgtcttagataatataccctcaggaccggacctagtgcattgcctggtatggaggaagtaaccggtaagtatatattggttgaatgaatgatttgatttcctagtttttggaattggcccatgattctaagtgaatgagctcacctcagatgccttaatagtaaatgaaattttgcagcagaaatattttctaaaatacattgatttttatggaactagtgtcttgttttcaaaacagccctctgttttgctacaacaaaacatttcaagagtttcaaatttaaattggctactcaaagccaatttcttcatttttttcctatctcagtggtctagaggggcatcttggtgttttaagtggaacacaggcttagaagtcagacttgggtttttttgttttgttttgttttgatggggtcttgctgtgttgcccaggatggagtgcagcggcaccatctccgctcactgcaagctccgcctcctgggttcacgccattctcctgcctcagcctcctgagtagctgggactacaggcgcccaccaccacgcccggctaattttttgtatttttagtagagactgggtttcaccgtgttagccaggatggtctcaatctcctgacctcgtgatccgcccgcctcggcatcccaaagtgccgggattacaggcatgagccactgcgcctggcctagatttgggttttacttacagccagctcagctattaacacattgtgtgaccatagctagttacttctccatgctggaactcagttccctctaaaaaattggagaactgaagcaaatgagctctgtaattctatgaaaataaacgcacaggataaaaaaagagaacttgtttcaacaagataattctctgtctttggcctagttgaggggtccccaacccccaggccatggaccagtactggtccgaggcctgttaggaacccgatcgcgcagctgtaggtgagcggggcaagcgagcattaacgcctgtgctctgcctcctgtcagatcagcggagcattagattctcataggggcgggaacacaattgtgaactgttcatgcgagggatctgggttgcccgcagcttatgagattctaacacctgatgatctgaggtaggacagtttcattcatcacccccccatctatggaaaaattgtcttcctcaagactggtccctggtgtcagaaaagtttgggactgctggcctaggcgatcacttctctcatttcagcttcactttctgacacaggagcaataatcctaaagtgaggagggggagtcactttaaaaaaaaaaaaaaaacagcaaaaacatcagtcattatggtgaaatgtcaacacagtaagtcttttctaatatctctgcagaatgctacatgagatttgccctgattcatagatggctatggtatgtgtaatacataaaaatataatgtatcatctcagacatatgtcttggctgacattcagcaccaagaatctgacaaatgtttttatatttatgtacattctgcctgatttcaaaaacagatttaagatagctatactcaacatcatagaaataattaattctggacgtctttagaatgagaataaaaacaggagccaagtgtttttttttttttaagtgattatgttaggaaacttaaactctgagagcttccaaaattcaacatgaattgtaacttcatggttcctggaagccagagccaacagggaagtaatgggctgcctagctcttcttgtctgataacagccagagtaatgggctttgtggggaaaaggaaatatactggcacaattctacctcaggcctgttctgatagccttttgtcgaggcaatagccattcgttcataatgaaaccattgaattacaaacaagagtggcaacatagaccaagccttatttgtttgtggggattttactagttgtttggtagactttagccaggccacgtatagtaacagtagatgatgcttaatgtgccagatgctattctaaccgtattaacatattaaaaatccttacaagagccctgtgtgttaggaacagtgctttggggtctgtgctcttatccactgcaccatactgcctcttacatgtctcaaatcgtacagagatttatcttactgcagtcacacagctcagcatcccaactctgggtgatctcaggaaagaacatctcatttaaagcaataataaccagtttaaatgtaggcagcctcagtgctacatgaccaaccagatggatcagctgtttacttattgagtccactggttcttttggcgttgttttaaggtggcttcttgaatgttaaaggaacaatctaggctctatctgaacctccttttgcatctttcattggtgacatgaggagcatacataggccatgtgtcctcttgtccttcggtatcttatctacctttgggctgctaaatatgccaaatcagcttctcttgtgtgccagctcactcagcaggggtggctgcctagaagactgtgttgagaagggctctcaggcctggctcagatgtcgtgagagaaggggtcatgactgagcaacaatgcctgatgtgggcaagggagagggtagcaccagagcgttgcctttgccagccatggcctagttcaagatgagggcttgcctctatgctgcatggcttctgaggttattttccctcagagtacttcccattcaagaggagaacagaatgtagcaattcacagaattcattccataaaaatgaattccctccctgtacaagacacacaataggaagattaataagtcaaaatccctgccccctcccaaatttcatcccagtcaaggacatataaattttgacaaataatatctatacagtgagataatgattattcttataaagtactgagggaacacaaacaaaagagtcactgtctatgcctggtaagggcagacaggtcaggctgcatggagaaggtgccagttgaccctaaccctgattccatccatgtgtatggagcccagagggtgtgtgttttgagaaccacctggtatgaccaacatcctcaatatgtctttgcaaccttccttttcagaatatatacagtaccaccagtagtaagtcatctttttggagtcttgatataatgacacacatgagagaatggatgaatccaatctaccacaatgggtcaatattttagaattttagctgtggcaaagacctttagggaaggcaaagggtggggcagggtttgtggaagccatggatatagggtgtcagtgctgggcaggttgaatagacttttctaaaatgaagtggaaaaataagaaatgcagagacagcctgcactggcattttacccaaggccattctgtgtcccttaggaaatgtgttctttacagggatttgaaaactatagggaatagtgattggggtcagaaatggcatcactggggctaagaaaccaaagataaagtcactttggagctaacctttgtattcagagagctttgtcctaatcctgcttagaatttccacggcgtcttttcttcccttaagagaaatcaaaaggctttcacttttcccctctctgccctgtgaagacaggcattcaaaacctcgttttgcaggttaaggaaattgagttcatggtctaagatcacagtgaattgaacagactcaaaagcaagcatttaatctctctcactctctctcttaaatgtagttcttagaatgagaattcttagtggttttaagaaaatggtaatgtttgtactataattaacccccagaaacagaacatcaaaaccaagacactttggcaatcgtcttatccaatgttctcattttaaagatgtggactctgggccgggcgcagtggctcacacctgtaatcccagcactttgggaggccgaagcgggcggatcacgaggtcaggagattgagaccatcctggctaagacagtgaaaccctatctttactaaaaatacaaaaaaaaaattagctgggcgtggtggcgggcgcctgtagtcccagctactcaggaggctgaggcaggagaatggttatgaacccgggaggcagagcttgcagtgagccgagatcatgccgctgcactccagcctgggtgacagagtgagactctgtctccaaaaaaaaagaaagaaagatgtggactctgaatctaagggacaactccaaataactcgaggatatctggtcattaaaacctactcggctctcaaggtttccatttctaactggaagccattgccttcaagagctgtttaagagcgtctgccacccttctagaactcagtttaaggacttctgctggagccttggaaggttcagggccctctcgtcaccattgctaagggctgttttatgttcttttatgagatagtctgttaggtgcagccacaagaaggagacacaggagaggctcaggaagacaaagtttatcgtggtcacaagtcctagaggcaggagacatggcacaccatgcaggtccacaggggaaagacaccagggcagtcaggaggcagaagacaggagcaaggggaaagcattaaggtaaagccatgatgggggtttccttggaaaagtcaaggcagggcagcgtgaacactttagggttggctagtttgaataatctcaggggccctaagctataggaatggtccctagttgactgtacctggccctgggatgatgaaagcagaggaattttgcctcttcgggtgttgggccagatagaggaggtgtggctctgaattggttagttcgcatgtcagaagtgtactcctggctgggccctttgctggctctaagaattaactatcctctcgccacccccccaggggcagtcttcccagctagaaaggttttttaaaagatgttcaaacatcgtaacatacataaatatgtaacacaagggccctggctcctctcagatatttttatttatttatttatttatttatttatttatttatttatttatttatttatttatttttgagacagagttttgctcttgttgcccaggctggagtgtaatggtgcgatctctgctcactgcaacctctgcctcctgggttcaagcgattcttccacctcagcctcccaaggagctgggatgacaggcatgtgcaatcatgcccagctaattttgaatttttagtagagatggggttttgccatgttgatcaggctggtctcaaactcctgatctcaggtgatctgccctcctccgcctcccaaagtgctgggattacaggcgtgagccaccatgcccggcccctctcagatatttctatccattgtcatactcccactctttccctaactactactgacttcagcttgcagcagaaaattcagcctttgtaagcttgagaggactcaggttgctgaccaaaagcagaagaggcctcccttcaaaatgtatggaatgttgcaaaaagtagacagtgatcctcaataatcagatacttccctcagaatggtctgctaaaccttcagtcttgttgaaccaattggttcagtactttgtaacagaacttgggaatttctccaccctggatgggatatttcttatggcctcccatcccaattcatgtcagcccttcccgcatttagacttggttactttcaactctttactcctggcatcatttttaaatgattcaggactcttggtttcaagtgacataaacccaccttgaattatcataggtggagagtgttggagcattgaacataatggaaagaaaagttagcttttttctacagttctgataggaacaggttctctccctgcagactggcgtcttctgctagacaggaagtgtgactactggcagctccagagcctcataatccatagcttcagttgcctggcatgcactggccctggacttctcacaccccaaactctcatatgtgggcccagctggctctcttgctcattttgggaccagtcaagttagactagagaggcagagtctgtaaaggaacgtggttggtgtgggggaaaaagcagtttccataagaaggtggtggtcccaggaagacaggatggtggcaaaaccaaaggtgtttgtgacaaacctgagagcatatcaggaagaggaatgattaaatcatttaagtgacaagagcaggttgaaaaacaacaggtgtagtatgcttttgtaaaaaaattggccaggcatagtggctcatgcctataatcccagcactttgggaggccaaggcaggcggatcacttgagcccaggagtttgagactagcctgggcaacatggtgaaaccccatctctacaaaaaatacaaaaattggccaggcatggtgttatgcacctgaagtcccagctacttgggagtctgaggtgggaggattgcttgaacccaagaggtcgagactgcagtgagccatgacttgcactactgcgttccagcctgggtgaacgagcaagaccctgtctcaaaattaaaaattaaaaaattatgtattcagtaaatcttttctaattgactttccattaatggaatgtcccagttggttaactccgcaccccctcggtaaagtacggggggaggctgaacattcttagctggcagcctggttcctaggacaccagcacacttctgctcccaccagctgaggcctgggctttccaagagtcattcttgtttcttgccaaacctgggaatgccagatggacttgttgttttaattataccatttaattaaatatcccccaaacgaaagacaaatacagaaagttatttctgtgaaagtcattgcgagtagctagaagcagtggctttttgcagaggggacagggcttttaccttttattgccgaataggttctggagtctgaccccctattttcaaattatagctctactgcttctttgctgtgtgacaccttgggcaagttgcagagtcatcctaggacttggcccctttactataaaatggaaatagcaaccttgtttgggtactgttaggattaagtaatataatgtatttgaagcactttgcacagttcttgggcacatagtaaacactcaacagatgccacatctatcatcatcgtcatcaacaatcacagccttattaaagatgtagagagaagtcattggctgtaaaggaaaaattttttttcttatcaaatcaatctctaaaaacctaaagtgtgtgtgtgtgtgtgtgtgtgtgtaaggacacctccagagagttctagagctgagtgaaaacctggtttattaaaatgagcctgggccgggcacagtggctcacacctgtaatcccagcactttgggaggccgaggcgtgtggatccagatcgagaccatcctggctaacacggtgaaaccccatctctactaaaaattcaaaaattagctgtgcatggtggtgggcacctgtagtcccagctactcgggaggctgaggcaggagaatggcgtgaatccaggaggcaaagcttgcagtgagccaagatcacgccactgcactccagcctgggtgacagagagagactctgtctcaaaaaaaaaaaaaaatgagcctgtaagtctgggtgcacatctgtaatctcaacactttgggaggccgaagtgggatgattgcttgaggctaggagtgtgagaccagcctgggcgtgagtgaaaccccatgtctacaaaaagttagtaaaaaataataataaaaaataaaaattagctgggcgtggtggcacacacctgtagtcctagctacttggagaactgagggggaaggattgcttgaacccaggaggtcgtggctgcagtgagcagtgattgcaccactgcacaccaacctgggcgacagcgagaccctgcttcaaaaaaataaaaataaaaaagcctgtagcccctcttccttccctaatatatttggcttctataaaaattaaaaacccagggataagaagaaggggagagaattggaaagcccctggttagctttaagggcctctcagtgcagcagaacccatgctggctctattcataactttgctctctggatcaatattctgaaagttggtacattcttttcatttgtgtctttcacagagggcagtaaaatttagctctaattatatttagggcatctggattctagtcagcattttctggctccgttttagaacctaaagtctgcggcttattcctaatgtggaaaatggaataatcccccaggcatgagaagaactccagcattgaggctgctgttcctctagcgagaagctgctgcagacatcacaagacttgttatacaaggaaacatgattacagtggattaaagaaacttgccaggggcttgaaggatttattgctttttgaattctgaatgagacataaatatgtttttcccctcttaattttggaccccatacgggtaaggtgagaaaattcttcagcaaattctagaatgcttagctgctaaagatcagttggttttgtgtccacgtcatattgcaaagggcatgaatacttgcttggcagagacacaaaacagtcactcatttctttctgttctgccaagttagttactgccttgtctcccagtgggagaaaaatgtaactccttggggactcttctggaaggcagcatggtgtaatggaaaaagcactgtagtcacaggcacgaggcctagactacagcgtcggtgcttataagttccattatttacaacaggtttcttaaactctgtaagcctttgtgctcttactgctcttttcggaaaaagcagttctcagagggttgtatgaaggattatagcacctttatgttcaatatcatctatagaaactcaactgttggatgcattagcatcagaatgacagcttgtagtacactcatttgtgttcacagatctcagaaatttttatgtcctaaatggagggacttttaaaaataatgatggagctgggcatggtggcacacacctgtaatcccagcactttgggaggccgaggcgggcagatcacctgaggtcaggagtttgagatcagcctgactaacatggtgaaaccccatctctacaaatacaaaaaattaggtgtggtggcgggcgcctgtaatctcagctgctttggaggctgaggcaggagaatcacttgaacccgagaggcagaggttgcagtgagctgacatcatgccattgcacttcagcctgggcaacaagagtgaaaccccatctcagaaaaaaacaaaaacaaacaaaaaaaactgatggcttcttaaccctatcacttctgcagattctttggtttctcaggaagccaaagagatagcatggggcagtggttagtaacaactctggagtcagaccaacctgagtttaaattcactacttattagctgggaagtctttgaacaactcacctaacctgttgttctcattttcctaatccgtaaaatggacataaaatattacctcaaccgtaatttgttttgtttcgttttgttttgagatggagtctccctgtgtcgcccaggctgcagtgcaatggtgcgatctcggcttactgcaacctccgccccccagcttcaagcgattcttctgcctcagcctcccgagtagctggattataggcatccaccatcgtgcctgactaatttttgtatttttagtagaggcggggtttcaccatgttcgccaggctggtcttgaactcctgacctcaggtaatccacctgccttggcctcccagagtgctgggattacaggcgtgagccaatgcgcctggccctatttttttattcctttgtcctgtttcctatgtgggacttatcaccgtttggcattattatttatttgtgttctgtctaccaccccagccccactcaaatataatccccataaaggcaaagacattatatgtcttatttactgctttatatgtcttgcctaacaaagtaactggtacattattgttacttaatatttttacctttgaatttttttgccaaaataatacagaattagaaagaattcctcccccagtgtcatggctaaatttatatacagtagctgacttggaaactgggcagagttgttttgcgtttggaaatactggtgttcttacagttgagtttctatttccaaaagatgcttactcagcctttgatggcacagtttgacttgtgacatcagaaggttgacaggcagaagtctgagtcagaaattcagctatagaagagcgtgactttcatccctgctcgccctttgaggtatggctggacacagctcagaaaggtcttggatttcaatttgtctaggaaggtatttagcaaattatttttaccatttggattttggtaccaatcacccgaggaatctgcagtctctgcgtaagtgaagaatgagaatggaaggggtaagtggagctagtgggagagcacaggccagcccgccacttccctggaagaactgatggctttttccaaggcctggatcatgcctcgcctatcctcctccccactccatgtccccagtccatcctctgacttttatttacttaccaccttggaagtcataagattctgaagttttccacagctgctgggacttaggcactgggccactgaggacaagctgacaggtcagtgtttgggctctggatttcacatcattcattagccctctcgatccccacagagagggacgttcatgctatgaactgtgtcatggagaaaacacagccctagaaagaggaactcttgatcccccactacttcattctttcaagccctgtgacctgttcctctaaatgcctgtgggaccacaggtgggcttgggatggggatgcttcctgaatgcccagggactgtacgcaaaatgttacgtgtgtgtattatgggcagccagggaggctcggtttcatcagactctcaacagataccatctttggtctaaaatagatttggaaccatgaccctgagtggacctaatgtatttttgtaatgtttgtagactgcacatttgcccctctggccctccaggctgtgtgtgggcagattgaggatggaaaagctgaagcggtgcacagctgcccaatcttgttgggttgttgcatgatggctctctcatctcttcttgagtttgcttatttacacaattaagctaggcccattgtgaatcaagtcctgacctgtcaacagaagatgagatggttgaagagggtagcaggcaattctgtgaacaaaatatagctatagatctggctttaagagtaaaataaggccgggtgcagtggctcatgcctgtaatcccagcactttgggaggccgaggcaggtggatcacctaaggtcgggagttcaagaccagcctgaccaacatggagaaaccccatctctactaagaatacaaaattagccaggcgtagtggcgcatgcctgtgatcccagctacttggggggctgaggcaggataattgcttgaacccgggaggtggaggttgcggtgagctgagatcgtgccactgcactccggcctgggcaacaagagcaaaactccacctcaaaaaaaaaaaagtaaaataaaatcatgccaccaacaaacctacctattagtccactgattttctttcctctgtgacaaaatgttcatctccatactcttaaaggagtgatgatacacttggcctttcacctgaggaagtataggatgggagctgcatgtcccagctcaggagtattgacgttcctcttctcagttagccctgtccactgcagcccagctaatgtcttacaggctattagagatggtgtactggggccaagcatggtggctcctgtctgtaatcctagcactttgggaggctgaggcggggtagatcatttgagttcaggagtttgagaacagcctgaacaacatggtgaaatcccatctccactaaaaataccaaaaaaagtagccaggcatggtggcatgtacctgtaatcccagctacttggaaggctgaggcaggagaatctcttgaacctgggaggcggaggttgcagtgagtgagattgtgccattgctctccagcctgggtgacggaacgagactccatctcaaaaaaaaaaaaaaaaaaaaagagagagagagatggtgtactgggctgtgcgtgcttcagctacccaacaaagcacctctaccttgtgcttacaacgaaattcagttaactgtaagatctggaaatccctggcaagtgaaaagctgctgcctggtgtgagtatgtctttgttttctagcagtgcaaattacttcatcttcagcaggagtgtggcacctctgtagtcacacatcacttaacgatggggatgcattgttaggcgattacatcagttgtcatagaatgtccttacacacccttaggtggcatagcctgctacatacttaggctatatggtccagcctattgctgctatggtggaaacctggatggcttgtgagtgtactgaacactgtgggcaactggaaaacaatagtaaggatttgagtatggaaacatagaaaaggtaccacacaaatgtggattttgtaatcttatggggccaccctcatatgtgcagtccattgttgaccgaaacgtcattatgtggtgtgtcactgcttactgagtgctgataacatgccaggctatgtgcagggtgctctacaaaatctatcatgtttcatcctgtccttttcctgaagtaaatgtcagcattcccattttacagatggggaagttgaggctcagaggtgtgtcagtgaacaggtctaagaaaatgtgtgggctgacataatgtgagggccacaggggccaccagaggacatggagtagaggccttccctgaagggcctcgggaactgagccgagccaggagaggagatgggatttaggctgaggagagaacacttgggaggagctcggactccaagtctgaggaaggcaccggcatttattactttcttgccgtattactctcgttcagtctttctcctttgaggtgcagatagtccccttctccagaattattctccagtcatctgcatgggatttgttttcagtgttttttgaattagaactgtagacacttccctcctagcctggcttttctccatcaaactccccatagccatttctcattgactagagcaggccctagcgagcccagcccttagtctctgtcccctccaggctaccctccatggtagcaaccaggcggcccttttggaaacacacatatgaatatgttactcagggacttccaaaggctggctagcctttgcttcagaatgagatcagctcttcagcatggcagcggcagacagctcctaccgctggccccagcttcctctcaagctggccctggcgctctggactcctcacacttctgcctggcaaacacctacttggtcttcaagccttcattcttcatagaggctacttgggttctgccccacacctgtcacctgaattgtcattatgtgtgagctccttgagaaaaaatatatgacttggtcatctttataccctcagtacctagcataacacctggcatgtagtcagcacttagtaaaaacatttaaaaaatttttactgtctccattttgcagatgaaaataagaaactttaaatgaataaaatgtttgactcttggggtcaaggccataataattagaaagtctcctttcactgtgtgttgtctcatttatattccccaggtgatggtcaaatggtataagaaatgcaggtggctccccagtctcggtgtctcacatattccaactctttttttttttagaactcagaaaagtacttcatagattggctttttagatttcttttttttttttttttgaaatgtagtctctatcgcccaggctggagtgcagtggtacagtctcagctcactgcaacctctgcctcaggttcaagcgattctcctgcctcagcctcctgagtagctgggattataggcgtgtgtcaccatgcacagctagtttttgtatttttagtagagatggggtttcaccatgctggccaggctggtcttgaactcctgacttcaagtgacctgtccacttggcctcccaaagtgctgggattacaggcgtgagccaccacacctagcctttttcagataatttcttcaagattaaactctacaaaattattatattagtctcttttgtttggaggttagactctcacacagatttaagcaaacatgagaatgtatttgttcttaaacctgaaaaattcatggagagttctaatgtaacctccactagatccaagtttttaaaaatgtcaatagcaaactttccatctccccctcttgcctgggttttccctgtatcgcttcatttttaggcaggctcttgcctcctgctagcaagatggcaattggtagctccaggcttacgtccccaagcttagtgactcctgtggaaggagagcgttgttcccaatggcactagctaatgtcctgcttgactcatccaccagtgaccctgtcactatggtagaggaagggggaactgtaactctttttggtcggatctgggatatattcttatctctagggttaggggtggaatagtcccacctaagtcacataatctgagagccagggagaaattggtgaaaaattagaaaaccggtgagtttatcaaagggctgagcaagcagagcaacagatgtccactgtggttatcttacctttcttttttgttgctaatacgtctgttatttcctagaatggtatgatagaccccaagcaggtggcttgtgtcgtccttttttggtaaatgcctacctcccaggacttttgaaaatggttcaactgctgtctttgacttttttaccccagcctttgtgattggtctgatagctccagtgtttgtgctggagacttggaatgccaaatgcgctgatttgcacaccgtttttcatgaaatcttatttttcttgataagatcagggaatccttaaaattcccagtggttttgagctagaatcctattgtgagttctctgatattacatagatttaaagcaaatgcatttttcaggagcatactttcctttcactttttttttgtaactaatcaatgatttctgacattcagtgactgcttgcttctgctattaggtgactttctgatattcagccctgactgccacttgtccctctgacctagccataaaatactaatatttgcagctccctcttatatggtgaggaataataaaacattatagcactttgggctttgtttcatttcttcccattgatagcttttttcctgccactgtcagcatagctatttcccagcatgtttttccctccagttctgcagccacatagtattttctgactgctatcacctacccaggaagaaaattgtcacttactgagtacctgttttctgttaagtataccaacaggactttcctgcaaatcatcccatttatttttcatagcatccctttgtgggatggatatcattatccccacttaaaaagatgtggaaagtaaggctaaagggaggataaataatttgccaaatgttttagaacggatggaaaaactcgggattcagttctgagtctactaaccctgaaaggccgttctccaagaataaggctagaagctttaagatactggaaaagtatgagaccccatttctgacctaaaggcaaggatcaagactaacacatttgaaacaatgagagtgaatttaagatagagtcacttctgagtgctgtgtgatatcatctatttgcagtgctgttgaaattcagaaaacagttctgcctccagattctatttatctttgaacctgactgggaatatatattaatattaaatcaagactttatttttaaatgtaaccctagtgccagtttcataatataccaattcactatttggttactgtgctgtgctcagacttctgttgaaccccaaaacatcagcgagccctcaatttctgtgcatacgttcaaacctcaggtcccctgctttgtagatcccgtgaactccctgataagcacaggtcacatttaccaactcttcattatacatctgatttggcaagacagtggccaggggaaggtgttaatctgtgcccaggttatatgccacttagttgagttcagttcagacttaccaagtgtgtagtaagccaagtgccaccacctggcaggtgatttgcagggctcactgggggatacgacatattcatccagtgtcttctgaatgctcagcactcttctaagcactggggacagtggcaagacagacaaggcagggcctctgttttcatggagcctacttttctagttctataaataaatgaaaaaagtcactttcagctagtgatgagcacagtgattaaaataaaacagaggctggtgcggtgtttcacacctgtaatcccagcaccttgagaggcccgaggtaggtggaccacttgaagtcaggagttcgagaccagcctgggcaacatggtgagactctggctctacaaaaaatacaaaaattagctgggcatggtggtgtgcgcctgtggtcccagctactctggaggctgaagtagaaggctcatctgagcacaggacttggaggttgcagtgagccaagatcataccactatactccaacctgggtgacagagtaagcccctatctccccatctcaaaaaaagaaagaaagaaaacagagtgtttggatgaattggtgtggagggtgggagtcgagaatagatgtcaggagttaatataaactggcaggttgtcagtaaaggtccctcagagtaagtggcttctgagctgagcccggaatgcaaagaaaggagccagacatgtgaggagctgagatgaccctcgtctaggcggagggaacatcccatgtgaaggcctaagcagggaataagcatgctcagtctaaggatggggtgggagtggggggccggagccagtatggcagcagtgcagtgaattagtggggagtggtaggaagtgaggttggcaatagagggagcacgtgacacgggctcttgcaggctgtgagacctagcttatgttgtgtttgaagcaggagagtaacaggagtgacttaacttttttttttttttaaatcctggccactgtgtggggaatggattgggttatagaggagtagaaataagaaggtttggggtgaatgctgggcaaggtagattatattgttattgttattgacatcatagaccaggccagggaatttggatttgctcctaaagctaatgatgtgtaacaataatagctcccatctcttgaatacctactgtgttccagtcatgcgggtttatgtgcattccctcctcaagtccttatacacacccacaaagcccctatccactgggcttattattaatgtcacttcttataaaggaggaatctgaggtggacagagcctaggttctgagcattccttagtgaggaaagggaaccagagctgcatgatgggcagggggctggcgagatgcgtcaggattcacatggcaggacctggagtttggcagggactttgaggtgcaaaagagaagacccctgttgggagcacacatcccagggcggcctgcatgtaaactgctgggaaaagggctgcgggggaggcttagataaaacagacgcggatgctaccctctgcagtctgcagatcagcaggtgatcaggtagacctctcacccaaagcagaacatggcaagctcctgaaggagaatttgttgatactgttaacttagcatgtcagaaaaatgtcccagtgtcagaattgaattcctatacctgctaggtcagttttaagctaaaatgatcttgcaaaacctgttgacccattgataccctgtaccctaagtaggcagttggtattatttcttaactttggttcgtctatgtccatctctctgtctctgagacacacacacacacacacacacacacacacacacacacaccccctcccagagtccgagcattctagagtttcctaacagtgcagttgtcctgtctgaaatgtttacattggggaaaaaatgaacccctgctgtgattttatttccccacaggctctaggggtcttttcatagccgcaaggcatcatcacagcttcccaaggactagggtgtttatgtgtgcacagaaaccacactgcaaagggtcaggtcctctcctttgtaccctaaggtgtagagaaagctggacctcaaaactgatgtcacctgtaagaacagtttttgctttggttctggctttttcttttccttcttccttgagagggcttactatgttgctgttagttttctcccagcattcattcactctagcaaaatctggctacatatcagtttgtagaaaatgggcacaattctaggaatagctgtcctaatgtgttagctcaatgccgtggatgcgtcaacaatggctggtagctgccaccagttgacctgaactttatgtggtttttctttttttttttttttggtttttccttagatgagaactactgtttgctagagctgagataaaaccatttcaattagaaccttgtatcagaatataattactcctcccagagatagagtcctggcctgaaaagtgagtacaaaaaataaatagggacaaatagaaggagaatgattactggtacaaggtagatggaatggtaactcactttattctcaatgatgttatacaaatcaaataaaactctattcccatttattttattttagccgagtattcttgtccaaaatgaaaatcagatgtttttcttctttttcatttttttccaaagcaaatggttacaaacacttacttaatataatttactggagcttttttctgaaagaacatttatgttaactttcttttatgcatgtagtaacttttgatcaaaacatgactccactcccttgtttaatgttgagcatctggattaaaggcttcttttaatcttaaatacagattatggccctctttccctttaagcaaactgccataaaaccctggcacctttccagttttccttattaaagccctctttattacagtgttttccgatggcagtcattaaatgattgttatgcacaatgggcacttgattataattatttaactggcaatcagttattgcagcaatttggtggtgtaattaaaagggagcatgtttgtacctgccagcatctttgagatcttcggctctggatgaagcaggagaggcagaacataaacaaatggacggaagaatcaagcacttctgtgaatggaatcttttattcctcgcccatctgattcttggctgctttgttccataaggtagatgaacaatgatgataaaataaaatgtaaataagaatttttgtgctacaaactcctgaatcgataaatacgttcagtaatgaatgtaagtttctccatgtgctgtgaaatgctaaatggatagaagtgtatttatataattctatttcttttaaacacaagcatcagcatgttttctccctctaatttataaatgtcagcacttatttcttgatatataaattgatacaggatgccacaaacaaaaagttgccgcaaaagataagggcgtttgttagacacagctggaaagctttttagtcactatagaagttagcaggaatgtgattccaaagttaagatggccctcctgagttattcagaactctttcagttgtaagttgcaaattttaaccaacctgaacaagggggaatttttttgcttatgtagttggaatgttactggaactactcataggattacaggaagaactgcaggaaccaggactcagggctaggaactgggaatcagtacagcctagacgcattctctgtccatgtctcagctgagcttgcctgtgtttggcttcattctgagaatagtcttacagcttatttctccctgtggcaggaaacaggcctgatatcagtagccccagactcccatcttcttagcttaactccagtggaaagcagtctctatcttctacctttcataagtcagtctcgggaaaggattctgattgcccctacttggctcatatacccatccctggactaattcctgttgccgagtaaatagcacagtatgattatcctgcctggatcccatgtaatacctgtgggtagggcaaggaagttggagtcctgtgaccgacagtcttgttagagacattattagtatgaccccatcggtggtagctaatgactgagaaaaacatggtgattattttcaaaaatgagtatgaaaatctaaagtatccaaacttaaaaaaaattatttaaatgttttcccagaatgaatctctatctctcttttagaaacatcccattttgtaagaccaaggtatgaaagtattcatctgagtttcaaatgattgcctaatcttacctgtaatcattattgagaaccaaacacccattaatggtgtggtctaaggacaaggtcctgaagagatgagactggcgcatattaaagatgcctgctatgatgatgtggctgtcatggctacattatcatgagggatttggaatctggggttccagagagcacgtttttagccactatctctgactattaaatcacttacaacagctttggataataaaattctctgtttctctcttggtttggttccatattagaatctgcaagtgcaaaggcaaaacagtcagcaaaacagcagacttaaatagaaaaaagccccaaaaggaaaggaaaacaattgaaaatttaaaagaaaaacacccccacccccaaacatgatctaatcagtcttccttatggagaagttatgaatcatcctacttagcaaataagacaattgaatgtgcaagcccaaacttgaattaaagttattctcaacttcctgtttctcttattaacatgcatttattatttaataagtatttatgtatataattgagatatttaagctctgggtaacttaagtggctgtagagtactacctgaacacacaaggagaaataaactttgaatatgtgcctgtatatttacaacacacacacacacacacacacacacacacacacacacacacacacacacaattttttactttgtggatactggccaccacttgaagagtttcttgggaatctaatcttctcaatggcaggctccagcattgcctttgccagtagtttagttcatatggacttgatgccaattttcttttcacatatatgaaataacagtttggcacatagtaaataaaacagtgattccacagagaagactggcacctttcaaaaagtgaattgggcaggttcagagctaattttttctttaggtgaactgagtttaaattaaatgttgcaagagattaccatatttgtgtgaatttcaagaagtcaaaggccgtggcaataaagtattttcattttatagagtttttcttggaaaggccacacaccatatgacagcagagtgcttaaaacccagagcctggtgccagcacaaaatccaaacatcgtaaagttacttccaaagcccagatattgaccgatcccctctcttggagcagtgcatctttcaactagtccaagtccaccagcccagaatcaccctcccagcctcagatttcaagttggaagcccaaagtaaggcatgttttctaaaaaggaaaggaaaagctattggatagcaattgtcaagagtcaaaaaataaataaataaaaataagaataaaataaaatcatccccaatggaggagctttagcaaaagaaaagggagacatgccattggtcactgctgcatgtatgcattgtccctcggttggtttttaataaacccagctaacctccctccaccaaattgcctgtatctctccttctccacttagggctgtgtaccattactagaatatgaaatagtgatttgaaggggtcatttgttcaggttttccaggcttctgcactgcctgccctggaatcaattttttttttttttttgagatggagtctccctctgtcgcccaggctggagtgcagtggcacaatctcggcttactgcaagtcccgtctctggggttcacgacattctcctgcctcagcctcccaagtagctgggactacaggtgcccgccaccatgctcagctaattttttttttgtatttttagtagagacggggtttcactgtgttagccagcatggtctcgatctcctgacctcgagatccacctgccttggcctcccaaagtgctgggattacaggcatgagccaccgcacccggcctggaatcaatttttaaaacctgtctgggtgtgggtggcttatgcctgtaatgccagcactttgggaggctgaggtgggaagatcgcttgaggccagaaggagttcaagaccagctgggcaacacagcaagaccctgtctctacaaaaacatttaagattggctgggcgtggttgtgcatgcctatagtcccaggtatttgggaggctgaggtgggaggattgcttgagagcattattgggagggggtgcgatggtttgcggcagggggccgaggctgtagtgagccatgatcacatgactgccctccagcctgggcaacaaagtatgagaccctgtttcaagaaacagacaaaaaaaccttacaatctgtgctcactggtttcctcgacttcacctaaagggtatctgggaaggttctgcctcccctctgggctgggaatgtatgcagaagacttctttgaaagctttgctcacaaggacttgaaacccaggcttctcagtgaatttccataacaattcactgccaagtcacacaaatctgtcaaggaaggctttcctgggagagcgaggagggcctatccactgggtgacagctcggcaagtagcctccagtcctggccggctgggcctctcttcttcccagtccagcattagacttcactaccacctgctaatacatctgaggagagcaagaggtcctggtcacagcagatgatcagagttggtgccaggagtgtaaacaagtcataaattactcttaattcttctaggcaagggatactattagtcttcagttgtggaaaaaatgtactccctttaatgtcttatttatgtaatagttgatcctcttgtatgactataaatttgttttcttcggcaagcatttcccaagcatgtgctttgtgcagagcactgtgtaagcacctactgttgagaacaaatataggagttagggtttaaccggtacaaggtttcagctgggggcagataagaagttctgagatggatggtggtgacggttgcacaacagtgtgaatgcacttaacgctactgaactgtgcagttaaaaatggttataattgtaggttttgttagatatattttacgatgataaaaaaatttagggttcttacacttttttaaagtcaaggtgaactatgtatttgctgtaagttttaagtttcacatatttcccctagcaaaatgtaagtgtatgtgacttaccacaaagacctagaatttcacatttcttatattttacgtgcaggtgctgaggtcattatttctcagatttgtcctgttatgagaatattacctaagatcttatctaagttaacaaattattatcctttgcatcagaaataagagcaggatctcctctaatgaattgtataacctttcctgggttgggccttggacttaatgtcagcaccaccacagtgccaagaatgacgagagctttgttgagcttggagcacagggcttcagctcctatcttgagacttggtgaagtggataaagccctgagctttaggctctggttcctgcctctgcctttgagtaggggtgtggctgtgcaccagtcatttaatctttgtggaccgcagtttatttatctgtaagatgggagtgaaggccaaaggcctttggcctggcaagagttgtcaggcccaaacacgggaatgtttgtgagagcacttagtgctatgctggggacctagcaggtggtaagtcagtgtcatgccccttgcccttgaggctcctcctgtgacaaagggctgtaatgaaatggggcttcaaggagcccttaattctccacgtgtgggagctcatgagcggtcctaagaatcctcttctctctctcctgatgccccggttccttctctcatcactgctttctgtgctccgctctgtcccgcttccttccaactggaaagttcatgagagaagtatattgatgttctgtgagaaggggaatggctctccctgagcccttggctgggcgccacagcagctgtggaaacacaacagcgctcagcatctcctggtgtttgggctccgagctctttcaagaaacaccccatgtcctcaccatcttactcttcagacccaccacctttcccttaggttggaatctcttcccttggcttcttctgacctcttgtccctcagtctgtagccagcagcaaagaaagatgcttattactaccgtatctttttggtgggtactttggcctgctgactccttcagtagaatggaaagttgtatctgggggctgtcacccttcccttcctccttgtaggtccccctgctccacctgggtctagggtacagttgggccttactgagagctagaattccatttgttgaaagactagagtactttgataggtggtgtaattgatcagcctccccgaatttatagtatccttgtatatcttataaacatctgagtgatagagagctgacctcttccatactagcaccatgatttataggggatatctagtgccaggctactaatccagtgcttttcaacccttttattatcatttttgtacctttttttttttgaggtttatatcatttgtatacaattaagtgcatatatcttaagtatacatctcactgaatttttgttatctatatacctatgtaaataccacccagattgggagatagaacatttccaggacttgagaagcccccccttgagccccttacagtcagtacccctaatgataactacaattctgacctctatcaccctagttacttgggattctcaacgtttttccacctatacccacctctaagtcccacctctcctatttaatatgtaagaatgcaaaattatcagctattgtggcaaaaagaaaccaaagtagtggtaaatttagaaatcccttttctgctctccttgcccctcacattttaataagcattctccccgtccccctgcccctaacccaggtcatggagaggtaaagtgatatccccatcctctctggtcagtcttggcatcacagaagcttgacgagaagagaaacagacaccagggcagcttcatcctattttccagctgcccaaaatcaccatatagtctttctaagaagaatcagactgtggttcttagaattgtcagatatccactgagctcccaacacgcacagatcttgctttcctttttctgtcaaagtaggattatctttcccttgattatgtttgagttttcttgggggtagggaatacatttgaagaggagtaaccactgcactccccttccgatgtgcgaatgtcaagcatgttgaattgtcagtggcaaggaatgtgatgagcaggttattttacaggaggtacacagaaagcccccattttggcttcttctgccatattcaaatccttgtatatagaagtggagcttaatctgtttatcctagagtaaaaatatctacaagacactattattatattgacactggagccaaataggaaatcggaggactcacagatgttatctgctttaatgcagtgggttttgtacacaatgaccctgcagccaatcaggatggactctacggtagaatttaaagaacatcttattggcacaatgtttattccttgggcttcgtaggctacattgtgttcccagcattctgagggcaagaaagatggagagagagaaaatgaacctagcaagaaagtattgggataaattccatcattaccctaaaaatataattatagcactctttgatatagggtagaatttggtataatttgacaattacttatgggcatgtattatatgggtagtattgcacaaaggatagtttgcagcctaagaggaaggtgataggccaaaacggttaagtcttcaggctgggcacagtggctcacacctgtaatcccagcaatttgggaggccgaggcaggtgaatcactggaggccaggaattcgagaccagcctggccaatacagtagaaccccgtgtctaccaaaaacacaaaaatcagccaggtatggtggcgtgcacctgtaatcccagctcctcaggaggctgaggcaggagaattacttgaacccaggaggcggaggctgcagtgagccaaaatcatgccactgtactctagcccggatgacaggagactccgtctcaaaaaatgaaaaaacaaacaaacaaaaaaaccacaaaaacgacaaacccaaaagggttaagtcttcaaagctgtctttttcagcattttaatccataatttaggacaaaattggcacatctagcagattcttggtgatccaggatattttctttttcttttattttattattattatactttaagttttagggtacatgtgcacaatgtgcaggttagttacatatgtatacatgtgccatgctggtgtgctgcacccattaactcatcattcagcattaggtatatctcctaaagctatccctcccctgaccccacgacagtccccagagtgtgatgttccccttcctgtgtccatgtgttgtcattgttcaattcccacctatgagtgagaatatgcagtgtttggttttttgttcttgcgatagtttactgagaatgatgatttccaatttcatccatgtccctacaaaggacatgaactcatcattttttatggctgcatagtattccatggtgtatatgtgccacattttcttaatccagtctatcgttgttggacagttgggttggttccaagtctttgctgttgtgaatagtgccgcaataaacatacgtgtgcatgtgtctttatagcagcatgatttatagtcctttgggtatatacccagtaatgggatggctgggtcaaatggtatttctagttctaggtccctgaggaatcaccacactgacttccacaagggttgaactagtttgcagccccaccaccagtgtaaaagtgttcctatttctccacatcctctccagcacctgttgtttcctgactttttaatgattgccattctaactggtgtgagatatctcattgtggttttgatttgcatttctctgatagccagtgatgttgagcattttttcatgtgttttttggctgcataaatgtcgtcttttgagaagtgtctgttcatattcttcgcccacttttcgatggggttgtttgtttttttcttgtaaatttgtttgagttcattgtagattctggacattagcccttcgtcagatgagtaggttgtgaaaattttctcccattttgtgggttgcctgttcactctgatggtagtttcttttgctgtgcagaagctctttagtttaattagatcccatttgtctattttggcttttgttgacattgcttttggtgttttagacatgaagttcttgcacatgcctatgtcctgaatggtaatgcctaggttttcttctagggtttttatggttttaggtctaacatttaagtctttaatccatcttgaattaatttttgtataaggtgtaagcaagggatccagtttcagctttctacgtatggctagccagttttcccagcaccatttattaaatagggaatcctttccccattgcttgcttttctcagtttcgtcaaagatcagatagttgtagatatgcgacgttatttctgagggctctgttctgttccattgatctatatctctgttttggtaccagtaccatgctgttttggttactgtagccttgtagtatagtttgaagtcaggtagcgtgatgcctccagctttgctcttttggcttaggattgacttggtgatgcgggctcttttttggttccatatgaacttttaagtagttttttccaattctgtgaagaaggtccttggtagcttgatggggatggcattgaatctataaattaccttgggcagtatggccattttcatgatattgattcttcctacccatgaggatggaatgttcttccatttgtttgtgtcctcttttatttcatgagcagtggtttgtatttctccttgaagaggtccttcacttcccttgtaagttggattcctaggtattttattctctttgaagcaattgtgaatgggagttcactcatgatttggctgtttgtctgttattgctgtataagaatgcttgtgatttttgcacattgattttgtatactgagactttgctgaagttgcttatcagcataaggagattttgggctgagacaatggggatttctagatatacaaccatgtcatctgcaaacagggacaatttgacttcctcttttcctaattgaataccctttatttccttctcctgcctaattaccctggccagaacttccaacactatgttgaataggagtggtgagagagggcatccctgtcttgtgccagttttcaaagggaatgcttccagtttttgcccattcagtatgatattggctgtgggtctgtcatagatagctcttattattttgagatatgtcccatcagtacctaatttattgagagtttttagtatgaagggttgttgaattttgtcaaaggccttttttgcatctattgagataatcatgtggtttttgtctttggttctgttttttttttttttttttttaatttatttttttattgataattcttgggtgtttctcacagagggggatttggcagggtcatgggacaatagtggagggaaggtcagcagataaacaagtgaacaaaggtctttggttttcctaggcagaggaccctgcggccttccgcagtgtttgtgtccctgattacttgagatgagggattggtgatgactcttaacgagcatgctgccttcaagcatctgtttaacaaagcacatcttgcaccgcccttaatccatttaaccctgagtgggcacagcacatgtttcagagagcacagggttgggggtaaggtcacagatcaacaggatcccaaggcagaggaatttttcttagtgcagaacaaaatgaaaagtctcccatgtctacttctttctacacagacacggcaaccatccgatttctcaatcttttccccacctttcccgcctttctattccacaaagccgccattgtcatcctggcccgttctcaatgagctgttgggcatacctcccagacggggtggtggccgggcagaggggctcctcacttcccagtaggggcggccgggcagaggcgcccctcacctcccggacggggcggctggccgggcggggggctgaccccccaacctccctcccggacagggcggctggccgggcagaggggctcctcacttcccagtaggggcggccgggcagaggcgcccctcacctcccagacggggcggctggccgggcggggggctgacccccccacctccctcccggacggcacggctggccaggcgggggtctgacccccccacctccctcccggatggcacggctggccaggcggggggctgacccccccacctccctcccgggatggggcggctggccgggcggggggctgacccccccccagctccctcccggacggggtggctgccgggcggagacgctccttacttcccagatggggtggctgccgggtggagaggctcctcacttctcagacggggcagcctgccgggcggaggggcatcctcacttctcagacggggtggttgccaggcagagggtctcctcacttctcaagacggggcagccgggcagagacgctcctcacctcccagacggggtctcggccgggcagaggcgctcctcacatcccagatggggcggcggggcagaggtgctccccacatctcagacgatgggcggccgggcagagacgctcctcacttcctagatgtgatggcggctgggaagaggcgctcctcacttcctagatgggatggcggccgggcggagacgctcctcactttccagactgggcagccaggcagaggggctcctcacatcccagacgatgggcggccaggcagagacactcctcacttcccagacggggtggcggccgggcagaggctgcaatctcggcactttgggaggccaaggcaggcggctgctccttgccctcgggccccgcggggtccgtccgctcctccagccgctgcctcccgggcggcactcgccggcgcggcggcaaagactgagacagctccgctgcccgctgaactccatcctcccggcggtcgggcagcggcggctgcggtcggtcgcggcagcggctccgcttcatatctgcagctggggcccgcgggtgtcagcgccgcgactgtcccggctccgcactgccccgggccgcagcgcagcggcgccaaccaccacccgcggccaccatggccggacgggctccctaagccaccgaccccagcccgcgggccttcgagccttctggggcctccggcgccgtgacctcctctcaagatgtgaatgattcttctggttctgtttatatgctaggttacatttattgatttgcatatattgaaccagccttgcatcccagggatgaagcccacttgatcatggtggataggctttttgatgtgctgctggattcggtttgccagtattttattgaggatttttgcatcaatgttcatcaaggatattggtctaaaattctcttttttggttgtgtctctgccaggctttggtatcaggatgatgctggcctcataaaatgaattagggaggattccctctttttctattgattggaatagtttcagaaggaatggtaccagttcctccttgtacctctggtagaattcggctgtgaatccatctggtcctggactctttttggttggtaagctattgattattgccacaatttcagagcctgttattggtctattcagaaattcaacttcttcctggtttagtcttgggagggtgtatgtgtcgaggaatttatccatttcttctagattttcccagctgtatgctgggagaaccactgctctcttcaaagctgtcagacagggacatttaagtctgcagaggttactgctgtctttttgcgtagaggtgtttgtagtattctctgatggtattttgtatttctgtgggattggtggtgatatcccctttatcattttttattgcgtctatttgattcttctctcttttcttctttattagtcttgctagtggtctatcaattttattgatcctttcaaaaaaaccagctcctggattcattaattttttgaagggttttttgtgtctctatttccttcagttctgctctttagttatttcttgccttctgctggcttttgaatgtgtttgttcttgcttttctagttcttttaattgtgatgttagggtgtcaattttggatctttcctgctttctcttgtgggcatttagtgctataaatttccctctacacactgctttgaatgtgtcccagagattctggtatgttgtgtctttgttctcgttggtttcaaagaacatctttatttctgccttcatttcgttatgtacccagtagtcattcaggagcaggttgttcagtttccatgtagttgagcggttttgagtgagtttcttaatcctgagttctagtttgattgcactgtgatctgagagacagtttgttataatttctgatcttttacatttgctgaggagtgctttacttccaagtatgtggtcaatgttggaataggtgtggtgtggtgctgaaaaaaatgtatattctattgatttggggtggagagttctgtagatgtctattaggtccgcttggtgcagagctgagttcaattcctgggtatccttgttaactttctgtctctttgatctgtctaatgttgacagtggggtgttaaagtctcccattattattgtgtgggagtctaagtctctttgtaggtcactcaggacttgctttatgaatctaggtgctcctgtattgggtgcatatatatttacgatagttagctcttgttgttgaattgatccctttacaattatgtaatggccttgtctcttttgatctttgttggtttaaagtcttctatcagagactaggattgcaacccctgcctttttttgttttccatttgcttggtagatcttcctccatgcttttattttgagcctatgtgtgtctctgcacgtgacatgggtttcctgaatacagcacactgatgagtcttgactctttatccagtttgccagtctgtgtcttttaattggagcatttagtccatttatatttaaagttaatattgttatgtgtgaatttgatcctgtcattatgatgttagctggttattttgctcgttagttgatgcagtttcttcctagcctccatggtctttacaatttggcatgattttgcagtggctggtaccggttgttcctttccatgtttagtggttccttcaggagctcttttagggcaggcctggtggtgacaaaatctctcagcatttgcttgtctgtaaagtattttatttctccttcacttatgaagcttagtttgcctggatatgaaattctgggttgaaaattcttttctttaagaatgttgaatattggcccccactctcttctggcttgtagagtttctgctgagacatcagctgttagcctgatgggcttccctttgtgggtaacctgacctttctctctggctgcccttaacattttttccttcatttcaactttggtgaatctgacaattatgtgtcttggagttgctcttcttgaggagtatctttgtggtgttctctgtatttcctgaatctgaatgttggcctaccttgctagattggggaatttctcctgaataatatcctgcagagtgttttccagcttggttccattttccccgtcactttcaggtacagcaatcaaacgtagatttggtcttttcacatagtcccatatttcttggaggctttgttcgtttctttttattcttttttctctaaacttcccttcttgcttcatttcattcatttcatcttccatcactgataccctttcttccacttgattgcattggctcctgaggcttctgcattcttcacgtagttctcaagccttggctttcagctccatcagctcctttaagcacttctctgtattggttattctagttatacattcgtctaaatttttttcaaagttttcaacttctttgcctttggtttgaatttcctcctgtagctcagagtagtttgatcgtcagaagccttcttctctcaactcgtcaaagtcattctccgtccagctttgttccattgctggtgaggagctgcgttcctttggaggaggagaggcgctctgctttttagagtttccagtttttctgctctgttttttccccgtctttgtggttttatctacttttggtctttgatgttggtgatgtacagttgggtttttggtgtggatgtcctttctgtttgttagttttccttctaacagacaggaccctcagctgcaggtctgttggagtttgctagaggtccagtccagaccctgtttgcctgggtactagcagcggtgtctgcagaatagcgaatttttgtgaaccgtgaatgctgctgtctgatcgttcctctggaagttttgtctcagaggagtacccggccgtgtgaggtatcaggacagggacatttaagtttgcagaggttactgctgtctttttgtttgtctgtgccctgcccccagaggtggagcctacagaggcaggtaggcctccttgagctgtggtgggctacaccaagtttgagcttcccggctgctttgtttacctaagcaagccttggcaatggtgggcgcccctcccccagcctcgctgccaccttgcagtttgatctcagactgctgtgctagcaatcagtgagactccgtggtcataggaccctccgagccaggtgtggaatacaatctcctggtgcgccgtttttaaagcccatcggaaaggcgcagtattagggtgggagtgacccgattttccagttgccgtctgtcacccctttctttgactaggcaagggaactccctgaccccttgcacttcccgagtgaggcaatgcctcgccctgcttcggctcgcacacggtgctctgcatacactgtcctgcgcccactgtctggcactccctagtgagatgaacccagtacctcagatggaaatgcagaaatcacccgtcttctgtgtcactcacgctgggagctgtagaccagagctgttcctattcagccatcttggctccagcccctccaggatattttcttgacaccctttgctgagggactcgtgacaggggttccctgtttactcagtccgttgtgctcaactcctcgcgggagggagcacgtgaatgaataagttcaggaaccagctgctgcttcgggcactggcaggagcaaactcccttaacttgggtccactcactccaccctcactggagggaatgcataggtgagcaagtgcaggaactagccggtcactttagcactggcaggaccaaactcttgtttgctcaggcccatcgcactccaccccttgcgggagggagcatgtaggccagcaagtgcaggaactgactggccactttggtgctggaaggaacaaactttgtgcagaccccacggcagtgtccaggtgggggtgcctgaaactccaaggccccagagggcatgttacaatgctctcttagctccgccgtccatggacagcagcgtgttatcagcttagtgggccctttgccttgtcacatggggcagatgccctccaccagcaagggcaaagggccagtgtgacagcctttttgggtacccacacttggtggatcccaaattgttgtccaatgccaaaaaagaatgaggtcacgtagacgaattgaagttatggtgaatgcagacaattttattgagtgatgagatcagctctcagtggagaggggagctggaaagggggtgggaaggccaggtcactctcccctgaagtcaatttgcctctctgcccctcttctccaaagtcaagttgcccctctctttgccatccagccaccatctctgaaggcaagtcgcctctccccaacatccagctgcttctcctctctgccagctgagcctggagtctttatagacacaggatggggggacagggctggccataggtagttttgcaaaaggcaacattcaattggtaaaaagacattattcagaaagaatgactcaggagagagcaggcaaacaggagaatagaagttctcaccctgggccaagggtttcaggctacttctggcttgaaggtggggtttccactggggacctgcccctgtctgcctagagtttctctgccttctgcctccctcaatgggtgatgctaaaccaggatgagtagtaaaatcaggatcagagagatcaggacagataagagtctaagcctaaccaggtaaaacacagcaggcacaaggtaggtaaatacttagatacaaaaaacaaaagtttccgtgatacagcctaggggaaacatgactaagtagtcctgtgaagaagaggtttttgatgcttgcaagcacaatctggggcatcacaaagagattcggtaccaagttaaacttctagaagttgaatggagagaacccatgcctagaggactgacttcactgcagattactacacttaaaactactgaggggtattgagaaccatgactggaaactgtgttataagaagcattcttaaatgtaaggagtagtagttaggtgaaagagaaaaccaaagagacaccaatatcccatcctcaaatgcaagaaggtgttaccaaaatgccagggattcagtctgggtcctgctgcttgccacacagaaagccaatcactgagacaatgactgttgccagggaagaaggctttaatcaggcgctgcagcaggcaagatgggagatcagtctcaaatccatctccctgactaaaatcaggggtttatatgccagagaagaaatgaaactacatgcaggaaaacaggaattagggaggggtaaggaagaggagttggtcaacaggaagcaggtggtcacttaggcaatcatgatgggtgaggggtctggtgtctcattgtccagctgtaattatcagctccttgataccatctgggtaggcctgatggttggttttctgagaagggaactcagattaagacaaatgtaactttaagtttgaaaactgggagagtccatttctgtgttaattcaaaagaaatcataaacatcggttctatgggacagctgggccggtttcaatgggctgttctgtatgtgaggcaggtgccctagaaggcaaagctaggattaggaagaagttataggaaatagtctttggttccatttggcaaagtcctttttcatcactttaagctgttgagcagagcagaatagatcatctcttgatggaacacagatatggaggactcacatttatggaggttgtgtcagatactagtcatagggctttggcagccatttgtcagaggtgttgaggaggggactcatgcactctgtaaaggcttgaacaggccaggcatggtggctcacaccagtaatcccagcactttgagaggccaaggtgagtggatcacgaggtcaggagttcgagaccagcctgaccaacatggtgaaaccccgtctgtactaaaaatacaaaaattagctgggcatggtggtgcacacctgtaatcccagctactcgggaggctgaggcaggagaatcgcttgaacctgggaggtggaggttgcagtgagccgagattgcaccactgcactccagcctgggtgacagagcaagagcaaggctccgtctcagaaaaaaaaaaggcttgaacagatgttctctaaggccctgtccaaacctgacagtctatgactgcttatgtgctcatgtaatcaaagcagacagggcaggctcagttgggtacgtggcttagactccccagggaaggaggcagggattgtcatggaccttgaagtatggacagaattaaggatcatgggatgaatgatgaataaaagctggacagtaggaaatggagattggggcttcctgctacaggtagtagtgtactgctaaagctttaccgggtgagggataaagtgtctcatcctgaggagagatgaggcactgaaatccatggacacccttgctctcaagtggtctcatacaaggagacaggctggcagagacccccagacatcttgataatgccagcaactccctgcgctgttggtcaatagagagagggtgcccagaccaagccactgactagttgtgctccagaagggtgcaggcagtttcctaacgactggaaaaagacaaactgtttaggagatgaggaattagacttaatgatccacctatggccgtatttgaggtttcacatttctcctaatgctgtctttaaaactcctgaagctgtaagtcagtcatgactgatggccatcattctaacagccgtggatatcaccaagtttctattttgccgtgtttcataaatgtggttctagagaactctagctttgttctagccactagcacacattttcaagttttatttaacttcccacattctccctttattttctcttaatggaatggccaacagcaagatgcaaaatatatataatggatgttaacgcagttcatgtgcaccgtaaggacttatactatattgtgtcattttcataggcgcgtcacgctagcatttccaggcactttccacatggtagccctatgacgtaagtaaatttgggcatgctccctgcatcacagatgaggaggctaaagcaggagagtttaagtgacacagtgagagtgggtacacaagtacagagaatagcccattccgtgagaggaaaggccattaaaaggaggacgttatcgctctttaactaaaaaaaacatccacagagaaagggtttggcattggcaaggccaagttaaacaggatgcagcattctctccaagcgtttccactgctatgcagcctctcctcacaccggtgcttttgggtcacttcctaatccctgaatgggttcgctgacctgtaaggagcagtgggaggtggagattgcttgcataaactcattgagggaagtgatcctgcaagtttcccaaggataagagaatgttttccctccctcccttcctttctactctccctcctcccctactcttgaaacaaccctatcccacctaccatagcacaagctgtaataccaagttgctcttctctgagggctgctgaggctgggactttgtgtcctcgctggaccagtgcattagggactatcaaagagattacaatagccaagggccatttaaagaaaccagagaatgcctgcatgactcttcatgaaaccttgacatttaataatcccatcacaggaggggtcccaaatactgtctcatttgatcttgttgtaccctgtttgagtaaagaattgagagtgttttatgggctaattctgtgggatgtattatcatactttctgaagctggaaaagaaaaataaagctgttaatacttggatctaaaataaacaaaaatccataggcctttccttatgtcatgtctttttattattttttattttattttattttttgagatggagtctcgctctgtcacccaggctggagtgcagtggtgtgatctcggctcactgcaacctctgtttcaagtgattctcctgcctcagcctcctgaggagctgggattacaggcgtgcaccaccatgcccagctaatttttgtattttagtagagacggggtttcaccgtgttggccaggctggtctcaaactcatcaactcaagtgatccgcttgcctcggcctcccaaagtgctgggattacaggagtgagcccccacgcccagcccctaatgtcatttctgatgaaacctttattgtatatttctcatgtttgtaattatttcagtttcaaaatatgttattctggccaggcacagtggctcatgcctgtaatcccagtgctttgggaggccaaggtgggtggatcacttgaggtcaggagtttgaggccagcctggtcaacatagtgaaaccccgtctgtactaaaaatactatatatatatatatatatatatatatatatatatttagccaggcatggtggtgggtgcctgtaataccagctactcaggaggcaggagaattgcttgaacctgggaggtggagtttgcagtgaaccaagatcacaccactgcactccagcctgggtgacagagcgagactccaccaaaaaaaaaaaaaaaaaaaaaattctgtccccctatttcccctgattttccgtagtctttaccctatctcacttggatgttattctatcttaatgcaactcgtacagtgcttgtctagtccctcgagatacaaagcagatcagttacttaattttcattttaaatgttgtttgtgagccgttgttgaagggcaactttggtacacgaggctggttttagtttcccatgtctctgccaatattcccatctgctgtatacattcactgctattataataataatagtttacaggagcccagattatgatattttaataatatagagccctttgttgacataaatggttcacgaaagttgaaatgaaatattaaagccacaattttggttctacttatcattgcatggaaaagactggacctgactcgtcgggtagacgtgagccttctttggagatttaatatttctttgcatcacaagtcattgagtcctcattttaagagtgatgttgagggctaggaccctctttggtggtcaaattagaattcaaccccagttaaatcctgactctcaatccagtattcttcctcctattccatgaaatccctgcatatatacacacatatacatacatacatacatatgtacataacccacctctttctctagaattgaggctgtagtctccaaacagaatttccaaaaatttgattccagtgtgcccctattagaattccaaaacagcaatcttcccagcacaatcaagggacacaattcctgctatctgggatgatatttttggcagctttgcagtgcagtcccctgtatggcactgctgctgaagaagcgggcaggcagctactctgtattgtcataggcttttgctgtgttggtgaatggcttttttcaggtgctataatttccttcacttgctatatgggccacctgcctctaccttctcattcctccaatccatccaccacctccactaggattaatcttccaaaaacattggttttcaccgtgtcactcctgtgaccaaacccctccccactgctaccagattaaagcttctaacgcctcagctggtgctccaagacctgctggccagactggtgaggccaggtgtcctcactgactccagaagaggctgtgttaattcccaatcctctttttcctctttccccttctaattgctctttctcctttctgtaggtcagcccttcataccacacaggggccaggcccaacccacttgtttgactctgtcctaggctgggctccaggccaactgtgctccttctctctgaactcctgaaatggctgccgatcctaggagagtgtatgagccaaactgttcacatcctcattgatcactgccatgacttctggtctctgagttcagctatgagctcttgcagaacaagttctcaaacctgcttggtccctggtgctcctagagtctcaggaattactccacagagccctaaaaagaaaaaacagtccatagcagttccatttattaagtagttaggaccaaacaatttcataggtaattatgtcctaacaatttagtagccacttgaaaaactgcacataaattgaaagaaaatataatcattttattctgaaataaccacagttatttactaatgggctgtgtgctcctgttggggactacacagcttcccaaaccttgaagtcagatgagacattgccacattcctctatcctttcctgttctacatgggttttcacacatacttgctcttatgaaacgactgccaaaaacccagttttccaaagatatgagatcatcagaaggaatgcagattgaactaatgttgaagctgtgacccaccttgatctagtggtttgtgcagtgcctgacagatgttagtatcatgttgctttccttgaaaatctaaaatacggccaggcgcagtggctcacgcctgcaatcccagcactttgggaggccgaggagggcggatcacctgaggtcaggagttcgagaccagcctggctaatgtggtgaaaccctgtttctactaaaaatacaaaaaattagacaggtgtggtggtgcacacctgtagtcccacctactcgggaggctgaggcaggagaatcgcttgaaccgggaaggcagaggttgcagtgagccaagatcatgccattgcactccagactggacaacaagagcgaaactccatctcaaaaaaaaaaaaaaaagaaacaaaaaatctaaaatatcccatggtgcagattcactgcagtgcccagggcacctccacacgcagtttgggagccacagtgctagctgttacacaggtgtagtatcataccagtcttgtgcatcccccaagatgcattgggcaatgcagtcctcatagtaggtggccaacaaatattttatgagcatcttaatccttatttcctgatgggccacaaacgccacaagttcaggagtgttctgagttccctggtccagcaataattcaaataaaatccattttaacatcttctggggatgctgtaaaggatatatctgtactgagtggaggttggcttagatgaccttttaattcccttccagggctaatgctctttaattcaatagcagcaacgcgcaacataaagaacaatatgaacacagttgtatggcagtggtgaggatgtaatgtctcaaacccccatgccaaaatattaaaaatttgaattctaacatgtagaatttggttggagtaaggaggtggagacataaaactgctgtttagttaatatgatattaatgtattaattgatgaaccttcttagttgccacaaaaattgatcatatcgagtaggacaccaagaaaaccacagtaaatgccaaaaaaatagaagtaacaataacatatctgatcactatgcaatacaactaaaaaatacaaattaaaagactaaaaactagaaaataaaactccaccattgggaaattttaaaactccccttaggtcaacaagaaaatcaaaaccaaaattctaggccatgtagaaaatgatgtgaaagttctacacgtaaaatttttgagtatagataatacagtgcttaggaaaattcttcaacttaaggtttttttgtttgtttgtctgagacggagttttgctcttgttacccaggccggacgtctcactgcaacctccacctcccaggttcaagcaattctcctgcctcagcctccagagtagctgggactacaggcgtgcgccaccacacccagctaatttttgtatttttactagagacggggtttcaccatgttggccaagatgttctcgatctcctgaccttgtgatctgcccatcttggcctcccaaagtgctgggattacaggcgtgagccactgcaccgcccaacctaagtttttgtataaataacagaaatgaatgaaaataatagggccgggcatggtagctcaccctggtaatttcagcactttgggaagccaaggtgcgaggatcacttgaggccaggagttcaagaccaacctgggcaacatagcaaaatgctgtctctactaaaaataaaaaattggccaggtatggtgatacgcacctgtagtcccagctacctgggatgctgaggtgggaggatcacttgatcctgggaagttgaggctgcagtgagccatgattgtgctactgcactcagcctgggcaacagagtaagaccctgtctgaaaagaaaagaaaatcatagaaattttgtatcatgcttagggagttataagaggaacaagaaaattaacccagggatatcagaaaacctgagaaaagtgcctaatatatagaaagcagttagtagatactagctgttattatttgtcagaaggactgagaagtttctatttcagtgttatttttgagtggtacagaaaaatctacagtgttacatttagaaagtaaagttcatttttgaaacagttgaggaaatttaagtacggactccatattattaatagataatgatattaatagataggtgtgataatgttattatggttgtataggaaaatggttacatagtaaattatgtattatggttgtataagaaattccctttattctcagggaatatatgctgatatattctgaggttaagtatcatgatgtctgcaatatactttttattttttagacagagtctccctctgttgcccaggctggagtgcagtggtgcgattgtggctcactgcagccttcgcctcccgggttcaagtgattctcctgcctcagcctcctgagtagctgggattacaggtgtgcgccaccacatccggctaatttttgcatttttagcagagacggggtttcaccatgttggccaggctggtctagaactcctgacctcagttgatcccctgcctcggcctcccaaagtgctgggattacaggcgtgatcctgggtttacttttgatccctcttgaagcttcctaaaatggtagtaaacatatatacacacatacacacatatgtttatatatatgtttgctgtcatgtaaaataacagtaacatatgtcatttatgtgatatatgcaaaactctgaaggataatgagagaataaaagtacaaacaagagcaacaaaaattttggatcctgaaaagatggacaagaacgttaaattctttttttttttaattttaatttattttttattattattatactttaagttttagggtacacgtgcacattgtgcaggttagttacatacgtatacatgtgccatgctggtgtgctgcacccactaactcgtcatctagcattaggtatatctcccaatgctatccctcccccctccccccaccccacaacagtccccagagtgtgatgttccccttcctgtgtccatgtgatctcattgttcaattcccacctatgagtgagaatatgcggtgtttggttttttgttcttgcgatagtttactgagaatgatggtttccaatttcatccatgtccctacaaaggacgtgaactcatcattttttatggctgcatagtattccatggtgtatatgtgccacattttcttaatccagtctatcattgttggacatttgggttggttccaagtctttgctattgtgaattgtggcattattcacaagaatgttaaattctaagccaaccagtagagaaagccagtatttcccatagagcctcctgaagacttggatttgggactatagatgcatctgaaagtgtgaagtatggggcttaaataggagagttggttgaacttcctaagaagcaattagatccccaggcccccaccttagcttttgtgcaataggacagacaactgccctctcttattccattttggaaactgaaagtttgctttctgttaagggtaaaacaggcttttggattaggatacaccagccagagttgaaagtagcgtgtataccactgaaaatatgggattaaatgaatgtttacataccagatacaggggtatccaagcttctccccacactaggatccaacaacacaggtggtcaggctcaaataccttccaggcaggagagtgggcagtccttctccagagcctctgaccagctcaaaagagcagttgtcgggggctctttgaatgacagtcggccagatgaccctatactgaaggccatagtggacttcagacagcttctgagtaccttctccttaagtaggagcagaaaccaagtattcccagatgtctaactcaaaaaagactagactaaatttgaaggaaaaaagacaatgtaaggagataaaaatgttacatgtcccaaaaaattctactatcatttatgttctcagtaagaacatataatatgtacatatatcttatccctcagtgaaagaggtactacattcatgaaacaaaaaatgctattaacaaaaaaaaggatattcaggccgggcgcagtggctcacgcctgtaatcccagcactttgggaggctgaggtgggcagatcacgaagtcaggaggtcaagaccagcctgaccaacatgatgaaaccccatctctactaaaatacaaaaattagctgggcatggtggcgcgtgcctgtaatcccagctactcaggaggctgaggcaggagaatcgccggaacccaggaggcggaggttgcagtgagccaagatcacgccattgcactccagcctgggcaacagaccgagactctgtctcaaaaaaaaaaaaaaaaaaaaaaatcaaatgattaaaagtactcttagaaattaaatatataagtttaaaattcagtagaaggattagacagtgaaatttagactatcttccagaaactaagcaaaaagacaaagaaatggaaaataagggagaaaagatgaaaagatggatcaggctagaagcaatattcaaataatagagtttgcggaaaggaaaacatagaaaacaggccagaaaaaataaggaagaaattaaaggcagttacccacaattgagagaaacaaatgtctccattgagagagtctaccaactgcccagaacagtagatgagactagaccaacactaaggttcatcatagtgaatttcaaaacagtgggaacaaaagacagtcgagagggggaaaaaagttgatatacaaagaataaaaaatcagagttgtttttggacttctgaataactacactggaaactggaaatcaatgcaacaatgctttcaaacaataaagggaaattatatctaatctacaagtctgtatcaagccaaaccgctcattgaatatgaacatagaatagatactttcagatacacaagatcagataaacaaaacatttgtctcctagtcaccctatgcaaaccattggaggatgaactccagaaaagtaagagtaaccaagaaagggaaagagatggaatatagggaatgggagatcccacaaaggagagattgaaaggcatcctcaaaacagtagcgaagggaagcctggggtggcagctgggcctgaagcactgaggatgactagaacagactggatccaggccagagggctctaggacagattgtgttaagatgaaatggcttgaatacctaatgtgtctgaacatatatttaggaggtttagacagttggcagagagtttgcgattaaattattgataagtacatagagacaaagtagaacaacagaaaagacagttgttaattccagggaaaacaatgttgtacaagaaagaataagtaatcctagtatattacatggcttacctagatacagcaattaaacagtcaaaataatgtcaacactggatgtagatctaaccaaaattatagtataattatgttgaaatggtggaaagatagggaggcaagagtttgccatgacaggggtaagggggctcacagcagtgaaagagccaaatcctcatttaccgagcaaaatgggaaatatatataatgcctaaacctgaaaagatcgagaagtcaagaggtgacaatatgagcacgttattttaacatacagaggtaactaaaagtatcaggtaagtctctacggagtatagtatggaagctgggagcctgttaattttcataacaagccttggaattatttggctctttaaactatgttcatacataattttactcaagtgaaaacgttttaaaaagaacaaaagtgctatgagaatgggcagactgggtttttaaaggacgagtaggagttctataggcctagggaatggaggagtgttcgcgcaggtagagaaaagaagactagcggtaagccaggtgtatcctggctctaaggaagcttgggatgtaggatatagtcacacttaagtatatgggcttttctcccttggtgtctgtgttgtttagaattgaagacatggaccttttgttactgataaaattataacctattactatttttggttattgttttaacataacattattctttgaattgatctcaaagagaggaaaatgagaggtcactgaaatgaccctggcagtaaaatttgctgaaaagcagcgtcctttacaagtccttacctccgaccgcaaaagagtcttctaaagaccactctcagccctcaagggtccttgcaagtcagtgacaccacaggaaatgggaaccttgccaagaattagggaaattcaggtgtctgcaagtccctaaaccctagggccaaaaaaaggatttggcagatgtttgtgtgtcctggaggcagatggatgaaagtatcagtaggctccgtggcttaagtgctagtcagtgctcgccattggtcttttgcagtcttgtcacttctgtctggaggcattcagagagctgaaaggtacacagtgcagtggtaacatctggaattgacccctggctccaccatcttcatgattagtaaagtcactaagcccctttgagagcaagatcaaggcagtcacagtcacaggggcattatgagtatcacgtaaagtcatgtattcatatatgggaatgctttgtaaatagaacatttctgtataaatcttgctttcagttagtgagtttgtgtattttttgagttggtctctctgtaaatgtgccttctttccctagtacatttattattactgagtccaggtacgtttgtgtattagttaaggtataggctaaggtactataatagaccccagaatatcacagtttaaacatggtagaaatttgtttctccatgtaacagtctagagctgcaccatccagtgcggtggccactaagcacatttgattatttaaatgtaattcgagcaaaataaaaagttaactgcctcagttgcactggccgcatttcaagtgcttagtagcctcttggctagaggttactgtattggacagcacagataaaacatttccatcattggttgggtgtggtcatcctatgtgcttatgcgtatcagcactttgggaggccaaggtgggcagatcacttgaggtcaggagtttgagaccagcctggtcaacatggtgaaaccccatctctacaaaaaaaaaaaaaaaaaaaaaaaaaaaaaacccaaaaattagctgggagtggtggcaggtgcctgtaatcccagctactcaggaggctgaggcaggacaatcacttgaacccaggaggcagaggttgtggtgagctgagattgtgccactgcactccagcccgagtggcagagcgagactctgtctgaaaacaaaacaaagcaaaaaaatgcttccatcatcacagaaagtttagttgggcagccctggtctagaggagtggtctagaacttgatgggtgctctgctgtacaaggtcatccacaggcctgagttccctaaatattattgctctgccattccctaggtaaggattcatagcattttttgtgccatggatcactttacagagtgacaaaggctagggaccacttcacagactaatgcttttaaatgtgcaaaatcaggctgggcgcagtggctcatgcctgtaatcccagcactttgggaggctgaggcaggcagatcacttgagatcaggagtttgagaacagccaggcccaacatagtgaaaccccgcctctactaaaaatacaaaaattagccaggtgaggtggcacgcacctgtagtgccagctactcaggaggctgaggcaggagaatcgcttgaacccaggaggcggaagtttcagtgagctaagatcacaccactgcactccagcctgggagacagagtgagactccatctcaaaataaataaataaaaattttgtttaaatgtgtaaaataaaacacagagttacaaaggaaattaattatgttgaaatacaattatcaaagtattttaaaaacccaaaatttatgacatagtaatatgtactttattaatacatcaaataatgatctagtgtcaattctaaaggctatttttgtaattccaaagtagtgatgagtatttgtgatatttcaagacaatccataagtataatgtgatatgaaaatacctataatttctgttattgacagagtcatggacactgctaataatgtggtttgttccctccattataagtgaaggaaatgctaaagttatgggtgttttttgtttttgtttttgtttttgtttgtccttccaaatttaaagaccagtgaattctattcatggactccttgagggtctgaggaccccagggttaagaagccctgctgggaattattaaagctagcccagcaattttaagtccacactctagatgtgggaaggaagagaggaaatggaaggcaaccatttcctgcttaaaggactggacctggcagttgctcacatcccatctcattggccaacattagtcacatggggtgtaaggcatgctgggaaacacagtctgtagttgggcaaccctgaaccttgctggtaattaaaaaaaaaacaaaaaaacaaaaaacaaaacaaaactgggagagttccatcagtaaaaggaagaagggaagaatggctagtaggataaacaacagcctctaccacagcttggctcatctctatggaattaaaacaaaagtgttttttcaaaaatgtgctgtttactctccgacactttgtataccttcaggtctacagcagatgtcaacaggaagcatttcactcttactagctatggacaggcccctatggtggtgccagttcgtgaggcacacagtgtctaaggtgggggggtgtccaatcttttggcttccctgagccacgttggaagaataattaccttgggccgcacataaaatacactaacgatagctgatgagcttaaaaaaaaaaaaaaagaaaaaattcatactgttttaagaaagtttacaaatttgtgttgggctgcattcaaagccatcctgggccacatgcgttagacaagcttggtctaagggatatagctttattttttaaataagagacagagtcttgctctgtggcccaggctggaatgcagtggcctgatcatagctcactgcctaccacaaattcctgggctcaggtgatcctcctgcttcagcttccgaagtagctggtgtaccaccatgcctgctaatattattattattttcttgtaatagagacagtgtctcaccatcttgcccaggctggtctccaactcttgggctcaagtgatcctcctatcttgctttcccaaagcgctgagattacaggtgtcagctaccatgcacagccctatgtagcctattttgaactaataatcctcagttctgtgcctgtagttgctgacagagccaacacttcacaagtgttggcttctgaagtgtgtttgtctcttgcttaaagcaaactcggtacaacgtgatctgcacttacaaaactaataacaaattaataacaaattagatctctgctcctgttaccaatgaccaatattctatgtgcaagagagcataagtagaaggagacagactttttccaaacaaacagatcccttgagcaaatgccctttaaactttaaaataacaacccccttgggttgtgcaggcctttaacttttcagagagctttaagtaccttaactcttcttattttattaaaacacccaggtcatgggttggttttttttctttccaagttagttaaataaataagcaattatgacgcagcgccacatggccaacagcttttagcttataaacatagagtttgaaaagcagtacttagaggccaacttggttggctgctgccggcaggagggagccgagctgttcccggcccagataacacttaaagggccaggcaggccctcatgcatgcacatttgtctacatccagggagctgttttttttctgatgcaacatgaatttcagtgtggttttttttttttttaagtgccaaattgtgagctcctgatggccagccacttgtgtcttataagcctccacaaagcctggtgcaactccttgtatgtcacagacatagacatgtttgctgacaaattgtttgtattttatgagcgtttataatggccttttaagtaagtgacgttttagagtttgctgaatgaagagtgatttttatttagtctcagaggcacagttgtttggtgtggttggttttttttggccacccctcccccaatctatctctaattttaagatgtgattcactaggaaaatatgattctgttaattgaattcattttatagccaacttttcaggaacctatctatttctgtaaagtgagagccacttgtaaatgtaccgtttggtgccagcactcaaattttccctgactcagttgctccagtggtgtttaaatatcttcccataaatcaggcagccagcgctccatacttatttactgggtcttgtgattcagcccaggatcctgatagtgatcttggatgggtgatataaatagactaggatttgccaatggctatttttatcagggaagctttctaagttgatttctttgaacccagaacaacttcctccctctggcttcccctgttttcctccaagactagggagatcctttctttattctgcccgcccatcttctgcccctcccccagccagctggtgtctgcagaaattagaaggaaggtacgtgcctgacacagagttgcctgaaatcatatatctttaccccctttcaggatcatctttctttcatccggcccaagaatggcaccttccccgcccatcaggccacctgcactcaggagtcggctgcctgtcctgaaatagatctctaccagctctcaagcagaacaattccttgcattcatacttgaatgtataatttgtgttattacctcttatttgtctttgtaagtttgtccctgccccagtttaaaaaaaaaaaaaaatctgagttactgctactgaaccaaagggcctcattcgaggtcttctttctccccaccccctcccccatcccagtgatacagatgctgccttgtctggtcaggccttcagggaggatgtcctgaccccctcaaccccccatctccaaagctgtcccctcgctctttgtgcaactcgccgcccacatccagcacagtaaaagcaggctgtcagctgggagaggctcgccttggaggactgtcctttctttacatcctcttcccagggcttcatgctgcaaaacagcacattctcaacatgaaacaaaaatggattctgttttctttttcacctagtgtttttggccatactgttcttggcagtcagacttccaggcttggggtagaatcgatagcttaaaagataaatgtttacactggtcagcaatgtgccatttggagccttggtgcccctggataatttgccagagtctgtggctttgtgtccggaattggtgggttcttggtctcactgacttcaagaatgaagccgcggaccctcgcggtgagtgttacagctcttaaggtggcgcgtctggagtctgtcccttctgatgttcagatgtgttcggagtttcttccttctggtgggttcgtggtctcgctggctcgggagtgaagctgcagaccttcgcggtgagtgttacagctcataaaagcagcgtggacccaaagagtgagcagtagcaagatttattgcaaagagcaaaagaacaaagcttccacagcgtggaaggggacctgagcgggttgccaatgctggctcaggcagcctgcttttattctcttatctggccccacccacatcctgctgattggtagagccgagtggcctgttttgtcagggcgctgattggtgcgtttacaatccctgagctagatacaaaggttctccatgttcccatcatattagttagatacagagtttcgacacacaggttctccaaggccccaccagagcagctagatacagagtgtcgactggtgcattcacaaaccttgagctaaacacagggtgctgattggtgtatttgtaatccctgagctagatataaagactctccatgtccccaccagactcaggagcccagctggcttcacctagtggatcctgcactggggctgcaggtggagctgcctgccagtcccgtactgtgcgctcacactcctcagcccttgggcggtcgatgggactgggcgccgtgagcagggggtggtgctcgtcggggaggctccggccgcacaggagcccatggcgggggtgggaggctcaggcatggtgggctgcaggtcctgagccctgccccgagggaaggcagctaaggcccagcgagaaatcgagcacagcaccggtgggctggtactgctggggtactcagtacaccctccgcagccactggcccaggtgctaagtcccccactgcctggggccagcagggctggctggctgctccgaatgcggggcccaccaagcccacacccacccagaactccagctggcctgcaagcgccgcatgcagccctggttcccgctcgtgcctctccctccacacctccctgcaagctgagggagtgggctccagccttggccagcccagaaaggggctcccacagtgcagtggggggctgaagggctcctcaaatgccaccaaagtgggagcccaggcaggggaggtgccaagagcaagcgagggctctgaggactgccagcatgctgtcacctctcagcttcacccacccagtgaccttgagtctccttaactttccaactagcctacctcccagaggtcccccacacccctctcccctccttcggccagccctgagggccaggccctttctcacttcctgaaccaagtactggaagtagaagaaactgttgtcaggctccgagttccacctctgggtcaagggctccagagcctggtgctgcagcttggccaagggaacccaaaaaccaggtcagcagtacatccactctctgagctttggttctgtcattgcacaggattaatgttccatctcagattaactctgaaatcaaatgaggtaatgtattagtacttgtgtgtacagaattggtgggttcttggtctcactgacttcaagaatgaagccatggaccgtcgcagtgagtgttaacagttcttaaagcggcacgtctggagttatttgttcctcctggtgggttcgtggtctcgctggcttcaggagtgaagctgcagaccttcacggtgagtgttacagctcataaaagcagtgtggacccaaagagtgagcagtagcaagatttattgcaaagagctaaagaacaaagcttccatagtgtggaaggggacctgagcgggttgccattgctggctcgggcagcctgcttttattctcttacctggccccacccacatcctgctgattggtccattttacagagagctgattggtccattttacagagagctgattggtgcgtttacaatccctgagctagacacaaaagttctccaagtccccactagattagctagatacagagtgtggacacaaaggttctccaagtccccaccagagtagctagatacagagtgtcaattggtgcattcccaaatcctgagctagacacagggtgctgattggtgtgtttacaaaccttgagctagatacagagtgccgattggtgtatttacaatcccctagctagacataaaggttctccaagtccccaccagactcaggagcccagctggcttcacccagtggatcccgcaccggggctgcaggtggagctgcctgccagtcctgcgccgtgcgtctgcactcctcagcccttgggtggtggatgagactgggcgccgtggagcagggggcggtgctcgttggggaggctcgggctgcacaggagcccacgggaggcagaggctcaggcatggtgggctgcaggtcctgagccctgccccgcggggaggcagctaaggcccagggagaaattgagcgcagcaccagtgggccagcactgctgggggacccagcgcaccctctgcagccgctggcctgggtgctaagcccctcattgcctggggctggcagggccagccggccgctcccagtgcggggcctgccaagcccacgcccacccggaactccagctggcccacaagtgtggcgtgcagccccagttcctgctcccgcctctccctccacacctccctgcaagctgagggagccagctccaaccttggccagcccagaaaggggctcccacagtgcagcagtgggctgaagggcccctcaagtgccgccaaagtgggagcccaggcagaggaggcgctgagagtgagcgagggctgcgagggctgccagcatgctgtcacctctcacttggagtgctttatgaaacgtagagagcataacaacagcaagaatatcgtagctgctgtcttatgaacatctactgtgtaccaggcactgggtttctttttttgaggcagcatcttgctgtgtcaccactatgcagtcttgatctcccacgctcaagcagtcctctcacctcagcctcccaagtagctagaagaactacagctactcatgtgccactatgccaagctaatttttttttggttttttagtagagacaaggtctcagccactgtgtttagtttaacacatgactgtctcatctaatcctgataaatacccttgaaaatattaacaccgctcttttataggtaaggaaagtcaggctcaaaaagatgaagtaagtggcccaggatgacaaacgaaggaaagtggttgagtcaagattggaatctggccagtgtgacttttagacccatgttctcatctactaagcaaactgttttccttcccataatcaggatttgcaagagaagcataattaactttgaagatgggcgtttgcaattcattttcttgggatgcccatctgaccttcccttttcagatcagcaggcagtttcctgtgcttaggactcattcccctctgcagaaggaactctggtgattttcccaccgggagagggagacatgagatgtggcttcctgttccaggaaataccgcccagtctttttacccaccctcagccaccccatgcactatgttagtcatagtcagtgcatggcgctagccagctctatggtgattctgccgggtaagccactagctgttgagatgaccaaagctcagaaagtgcttgctgcatttctgtttctgttgttgacagtggcctgatatgcatagcatacttacatagctccacttttcagagcctctggcaggtacaaattaatcaatcccctggcacagcacagtgctaaccacaaggagaaaagaaagagaagtatgttccacgcaggagaaactgccaagttgccaagtgcatctggtctaggtttttttttttttttttggagagagagtctcgctctgtcacccaggctggagtgcagtggcatgatctcagctcactgcaacctccacctaccaggttcaagtgattctcctgcctcagcttcctgagtagctgggattacaggtgcgcaccaccacacccagctaaattttgtgtttttagtagagacagggtttcaccatgttggtcaggctagtctcgacctccttacctggtgatctgccctcctcagcctaccaaagtgctgggattacaggcatgagccaccgcgcctggcctaggttttaaaatgcttcgttcctgagaagatctgatagaagttgaattttagttttaattcaagaaaagggacactataacacttagccacttttcagtgtgttcatgtctcaactgagaggtggtgtcggtgtttctactcactgtgtctcttgcgcgtgtgtgtgtatgtatgtatttttgagacagagtctcgctctgttgcctaggctggagtgcagtggcacgatcttggctcactgcaacctccacctccccggttcaagcgattgtcctgcctcagccacctgagtagctgggattacaggcccgtgccaccacgcccagcaaatttttgtatttttagtagagacggggttttgctgtgttggccaggctggtcttgaactcctgattacaggtgggattacaggcaggaaccaccccgcccagcctcaagtgtatattgacaagacattgtcccaggggtaatgacagaattgaaaatggtgacatggggcagtgggctgcacggccacatgtatacattaagcctcatagaactgttctctctttctctctctctcatacacatacacatcagttttatcacatgtgaatttttaaaatattttaagtaagatggacccttttcctcaaagagtgtaggtacagtttaatgggggataagacaatgaattctcttgctgggctaaagacagtctaaaccacaagagaagttgaaaaaagcagtgctgtggggcttgaagccagcatgagacactgctggccacgggaagtctcagccttgatggttgggtagtgtgtgctgaagatcagaaagtttgtggaagggcagggtagaggcatgggggaaggacatacgttttgggaacagctcacattcctttttaaaaaaaaaaaaaaacaaaaaaacataggacatagttcctaagctgatgtttgttgagcaccaactctgtaccaactgctatgttagtttctggggactctgagatggaaagaatgcatccccaactcatcagggaagatatacagatggcaaataaacacatgaaaagatgttccaatagcattaggagatatacctaatgctaaatgactagttaatgggtgcagcacaccaacatggcacatgtatacatatgtaacaaacctgcacgttgtgcacatgtaccctaaaacttaaagtataataataataaaattaaaaaaaaaaagatgttccacatcatatgcccattcaaatgactagataccatgtaaacacctactagaatggccaaaatgcaaaacactgacaacaccgaatggtagtgagaatgtggagcaacagaaactctcattcattgctggtgggaatgcaaaatggcacagccacttaaaactaaacacactcttactgtgtgatccagcaattgcactccttgagatttacccgaattagttgataataggtccacacaaaaacctgcacttgatggttatagcagctttattcataattgccaaaacttagaagcaaccgagatgtccttcagtaggtgaatggagaaataaactgtggtccatccagacaatgaaatattccatgataaaaataaatgagctatcaagccattaaagacatggagaaagtttaaatgcatattactaaatgaggcttggcgcagtggctcacacctgtaatcgcaacactttgggaggctgaggcaggtggatcacttgaggtcaggaattcaacaacaccctggccaacatgatgaaaccccgtctgtactaaaaatccacaaattagccgggtatggtggcacgtgcctgtagtcccagctactcgggaggctgaggcaggagagtcacttgaacctgggaggtggaggtttcagtgagctaagatcgcaccaccacactctagcctgggcgacagagcaagaccctgtctcaaaaaacaaacatattactaagtgaaagaagccaatctgaaaaaggcagcatactgagtaattccacctgtatgacattctagaaaaggcaaaattatggaggcaaaaattagttggggatggtagcgcatgcctgtaatcccagctactggggaggctgaggcaggagaatcgcttgaacccaggagatggaggttgcagtgagtcgagatcgcatcactgcactccagcctgggtgaagagccagactccacctcaaaaaaaaaaaagaaaagaaaagaaaagaaaaaaacaatgatggagacagtaagatcactggttcaggttaagggagagaagaggatgaataggtaatgcacagaggatttttgaggcagtgaattaaaagaaaaaaaactcgatccctgtccttacggatctctggtctagtcggagtcagcaggcacacagaggcctgctgagatggagaatcgatgctcagattcttcctctgtatccagaagaagccagaggagggtactgcctggccctgggaggcttcactagaggttttcgagaggaagatgcacgtctaaggtgtgacgggaaagggccagaaagagaatgagggaagaacattccaagccacagaaatggcacatggaagagagcagagatgagaggagaaaccatctgtgacttaggtggctcagcagagctggagagagtcgggcaattgagttgaagcacaggctggggccgtgccatgcaaggctttgccagctatacaagggcaccacatgccgtggggagaaccagagtgtttttagcagggtggtgtgatcagattcctacttcagaaagatgggcacagtgtgagggatggattggggtgatcaggctggctcaaggagtcccagtcagagagggcaggctagaaagaagtagacaattgaatcgatgttgaaaatatagaatgtacaggctctggtgattggttggatggtgagtgggagagaggaaggggaccaaggtgcttccctggggtctagtttagatgggttgagggcggggcaatcagagaaagactagttgtagagagagggagcaggaaaagggaaatagagctagaaagttaattagaaccatgctgtgaggatactgaatgccaaggtcaagactgtattgaaaaacctgagccgaggctgggcacagtggctcacgcctgtaatcccaggactttgggaggccaaggtgggtggatcacaaggtcaaagagatcgagaccagcttggccaacaatggtgaaaccctgtctctactaaaaatacaaaaattagctgggcgtggtggcatgcgcctatagtcccagctacttgggaggctgaggcaggagaatctcttgaacccagaaggtagaggttgcagtggcctgagatcgtgctactgtactccagcctgtcaacagagcgagacaccctctcaaaaaaaaaaaagaaaaaaaaaacctgagacaaaacaatcttagtgcagatcactctttgttactctgtttctttgctacatcagactttgaccagaacctgagatggagatggacatctgggagttgctggattctagaataaacatttgacagcctttcccagagtggcccatacccaaattgataatcaggattgtggaagcatagggaaacacttgataggagctgaaaagcagtgtacttttaagagaataactttcactgaattctaacaattatttctgaaagtattgaattcaactggtaagataaacaatcttaatctcctatgaccccaagtttctcagctggtaaatgaaggaaaaagacctgttgatctcagaattctcttgcagctctgcaattctagcctaataaaaattttcatcaagatttaaaaaaaaaatcttatataagtaaatatagagtccagtgctatttttcattgatcttcaaacatttttttccccaaattttaatgctgaaacaccaacttgccaaattttccagagtgcaaatcccctgcccagtgagctgttattatttgaaaatattgtggcctctaaagctgactttatctttaaaaaacaatttttttttaaccagcaaaaggaataaatttccatgtttataccaatgagtttcctgaaactaagaaaaactaaccattatattgtttcatgtaaggaacttgggtactatcataatccccattttaatgatgaggaaataaataggcgaaggtaattatttcagactgtgtttccttgacgcagtatttctggatggtgaatcttactcagattttgttttgatgctattcttgggattgacttgagaagcaccagtggctgactctttctttctcagtgcggaggggtaaattgggaacaagctgtcttgctttcatcatattatttgctgtcatcatgaaaggcaggcagtgagaggagttttttttttttttttttttttttttttttttttttttgagacggagtctctctctgtcgcccaggctggagtgcagtggggcgatcttggctcactgcaagctccccctcccagattcacgccattctcctgcctcagcctcccgagtagctgggaccacaggcgcccgtcaccgcgcccggctaattttttttgcatttttagtagagacggggtttcacagtgttatccaggataatctcgatctcctgaccttgtgatccgcccacctcggcctcccaaagtgctgggattacaggcgtgagccaccatgcccagccgagaggagtttttatactaccttaagcatcttttgtttcaaaccaaatcatcttcacttcctccttcccctccccacttgcagataatgacagattttttgggatcttaccacggaaatagctttggggccaccttcatacagctcaaggctgtgctgatgttgcaggagtgagggaaggagagatcccgtcccatcccccagatggcagctgtgtgtttgagacttttgcacatgaatttgtttaattttcaccaaggtcttgtgagacaaggaaactgaggctcagagaatgtcagtaaacccacccagagtcacacagctaaaagatggcagagccaggattcgaacccacttaggcagaccccagctcatgctccacacctcgatatgctcctctaccatgagtggcaagccctggtttattaaaactttcccagcagtgttagagaactcaaatgtccgaaaggccattctcttccattagtttattcactcagtaaacaagtggagctgatacatctacttccctcctattttgagggatattttgaggattaaagagctataattctgcttatagctcagcagcgagtgtgtgctaaccagtagctattatggctactgatggtggctgccgtgccaggcaccataccggatgggctggggacatggggatgaggaagatgccgtgctggccctggaggaacacacacacaggcagcagaggaaatggccccacagcaaacaacaagtgtgggtgaaagcagggcctcagcacacacattctacacttctgagctcgccctgtacctcacagcagccattatggccacctgacaagcttggtctcacagtcattctgtggatctgggccttggcttgtcagtaactggcaatgtgtttgggaagtgatttctctttcttcattatgtcagcatttaataataataaagaaaaagtcagcatttagtaggagccaccccacacctcacccgccagcattcttccctgagaagtaggcacagttggttgtgagtcttctccatggggccaacattctgcaaacaagtgagcatttccttgcacttaaggctgcctattagcatcaggggagtagtagttgctccaggccccacgcaggagcttgagagggagaatagcagagtggacagctgtagaccattgggttcccagtttccccttccatgatatggggaacatggtaaaaatgcctgtctcgcagcaatgctgagacatagttccaacagatgacagatcatgagataatacatgtgcagcatttcagatcagtagagccctaggcagccattggttgccataggcagccatgagttgagaaggccagtgccacaggagcacaggggcctaagaacgctggccatacgtgctagatgctgacaaagaccaggggaaagcagagtgtgactgggaccggcacaggaaagggtggctaagagtcacagagggtgacctcacctggactcataaacccaaagatgagggaggggtatgtggtggtggagaaaaagaggtgacgttttagactggggaaaaggcgcatcgcacagcagggcacggggaaggagcaagccaagcaagggatctgcccctggtctgctgccagggctgccgtgggagcagcatggcctggccagcccaggaagggtttttttgtttttttttttttaagacggagtctcgctctgtcacccaggctggagcacagtggcgcgatattggctcactgcaagttccacctcctgggttcacgccattcttctgcctcagcctcccgagtagctgggattacaggcgcctgccaccacgcctggctaattttttgtatttttagtagagacggggtttcactgtgttagccaggatggtctcgatctcctgaccttgtgatccgcctgcctcagcttcccaaagtgctgggattacaggtgtgagccaccacgcccggccccagcccaggaagttttgtggggaattttcctgacatggaatgactctagactgccgccgctgccgacaacaataacaaagtagataaagcctactggtatggcactcaactctttatgccgttggtcctcactgcagtcctgacgtagctaccattgttatctgcattttgtagaaagggacactaagggccatagagtattaagggacttgcccctaggttatcagctaataagtgaccaagccagggttccgtttcagatctgtctatccctagaactcaagcccttaacccaagcattacaaggttattcttgggaggagaattgtatgccttccaagtgcattcacctcctttcagctagctgtgccctacttgggaacagccctgtggaagaggtaagtcaccacgcagaggctggcagatcatgttgatggagtatcagggaactctgacaccctgaagctggggagaatcatgtatttttagaactgcccaccttttgtgccttcattcctttctgctaactataggtgggtttacagtaatttggagatgattctgggcttgctaggggacactggggaattccggaataagctcacgatttattagtgagatgagcggatgagcctcatactgtgcacagttctgcaggtcggctgagttagtcaccaggacttaggcaaggccactgagacactcctgtaagaagctggacagagctgggaggggcttgaaccagaaggaatcgtgccccaaggcagcagacataattattcatagaatttagactaaaattctagaggtcatttataccaaaatggtctacccaaagctttcagtgggtaatttcatatgactgtgaacagtaaattcaagtaaatcgtaaccttcaaaatcgcctgtcaaatgcccaccccaggcctagactgctctgagcttgtggtacagactgtgaacatgcatgctgttttgatttagtgtctgaaggcttcctttcacaaattagtagatagctctggatctagaacaaacgtatctgaggtcaggtcccagcccgccacctaccagccgcatgacctcaagccacttgcttttcctctctcagccctgttttctcatctgtaaaatggacacaatgataccttttagggcttttcagaggtgccgatgaaatagcctgtactttataaagtatgttgtaaatgttgctgacataattttgtgtcctgtaggaaatgcttccttgggtgtttgtattatagcccaatccaagtcatccctgagaacatccccaggttgtaaggattagtcagaagtcatgatgactgttctatataaatatttggcctattaactaaaattagtacctttccatttcttctctttcttgggcggggcagcgggggagtgcaggggaggggaaatagggaacgttcaattgtgttttaagtaatgctcataaaattcttagccaaagatgatcttgccctccaccttggtgacccaccgcatacggggtacatctatctggcctgtctctaggcctagacagaagaaacagggaggattattgttaacttttaccacatgtatgacttgttcccggacaacccattcttcctttaggcagaggtgatatgcactgaagtgtttgatttagagtgatggaaaagtctgtgctgccattcctcagggagtcctaaacgttgatttgcctttgggagggccaggcttcacgaaaacctgatttacggtgttgctctgggcctgatttcctttgcacactctggaggaagtgctctggtgatgttggcactgagcaagcaacaaaggttttaaaatgtcggccctggaaacaaaactgtaccttgtgatgttagaataattataccacacttgatctctgattacggccaaaacagcagttgctaaatccagctaacatggaaaaactagaaaaagtgaggggaaatcagccaaatgcatagcaagggatggggaaagcggacctggactggacacagaatcttctgtttccacttgtctggtaataactgcaacacttcatggtccccagccccagcgcccaccccttgtctagagccattgcgctctgcatgttgacactagctgtgggaactctgtgatttaaagttgagttgaaagaactgcttttatcatttcaagtatgtagccccaggccaaaacagacaaaacaattttttaaagtctcagttcaaaagcagcttgaaatattctctgttccatcaaaaggaaccccaaatctctccactgttctgtgggcccctttcctctgattgtctacctggcaggctccccttcactagctgtgctgtggcttagttaagctgaagttgaaacacagacaaaggaaggcattgctttccagccacaatggagaagcccattcccactcttgtccccactgggaaactgggttagagttctgagaaatgggattttggggtttcccttcaactgtgaaatattacagaaatacacaagttccatacacaacggtgatagctgctacatatttctcagaaaagcagaattctaataaagaatgtatagtctgttttttatgctttaataaataccaggcacagtgactcatacctataatcccagcactttgagaggcctaggcaggaggatcacttgagcccaggagttcgagaccagcctggacatcatggtgaaaccccatctctcctaaaaataaaaataataataattagtcaagaatggtagtgcattagtcgagaatggtagtgcatatctgtagtcccagcagctcgggaggctgaggtgggaggaccagttgagcccacaagttggaggctgcagtgaattatgatcatgccactgtgctccagcctgggcaacagagcaaaaccctgtcatttaaaacaaaaacaaaaacaaaaaaaaacaaaacaggcattctgagtcgatagcagatccccattgtcctgtcatcctccaggtgaggttctgtgtcttacagattaagaacatgaccctaaatcagcagcagatgtttaaaataacacagaaacaaacctcgtatattctatattttccctagccgcttcagaatttgctatgaaatttaagggtatttattcctctgtctgtgcaaatctcactttatttatttatttatttatttatttttgagactggctctgtcacctaggctggagtgcagtggcgcgatctcagcccactgcaacctccaccttctgggctcaagtgattgtcctgcctcagcctcagctgggaccacaggcgtgcactaccacacccagctaatttttttatttttagtagagatgtggttttgccatgttggccagggttgtctcggactcctgacctcaggtgatctacccgccttgacctcccaaagtgctaggattataggtatgagccactgtacccagccagtgaaagtagaaattatttatttatttaactattccttgaaaagaggaaacaaaatgttccctctttagcctgaatgattaactttactcataagaggttcacagtaagacatgtgatttttttttttttttttttttactcctttgcccttgtatgtgacagatgctcatttgtttgttgattaacaccttttacacagccaacattaatatctagttatagcctttttttttttttttttaaacggagtcttgctctgtcgcccaggctggagtgcagtggcgtgatctcggctcactgtaagctctgcctcctgggttcacaccattctcctgcctcagcctcctgagtagctggaactacaggtacccgccaccacacctggctaattttttgtatttttagtagagacggggtttcaccgtgttagccaggatggtctcgatctcctgacgttgtgatctgcccgcctcggcctcccaaagtgctgggattacaggtgtgagccactgcacctcgccagttatagccatttttaaatcaaaagaccactagcagctgctgaaaagttctgtcacctttaattcctcatgtgtagagactctacctctctcacaggattattttgagaatttaaaatgttattgtgatagttgactaggcttggtaaactgttcagtgctgtgctgatataaatgtgataactgctgctctgtttcccaaattcacaggcagaatatgaaattctgtaatcttgaatcataatcttcatcaagggccaggcaccatggttcatgcctgtaatcccagcactttgggaagctgaggtggtcagatcgcttgagctcaggagttcaagactagccttggcaacatggcgagaccccatctctacaaaaaatacaaaaattagccgggcctagtggtgcatgcctgtaatcccagctactcaggtggctgaggcaagagagtcacttgagcccagggaggccgaggctttagtgagccgtgatcactccactgcactccagcctaggtggcagagtgagactcaagtctcaaaaacaacaaaaaaacccccagacaacaagaaacataatcttcatcaagaactcttaccataatagaattttgactattttttaagatgctaatttataagcaataggattattagcaatgtccctgattctactacattttgtcaaagtggttattattggtgtatagcaaaactattgatttttgtatgttgattatattccaccagcattgttgacctatcttgttagttgtaacagtttgaaaattctttcagattttccacgtagacagtggtatcttttgcaaataacaatagtttatactcttgttgtctgtgtacctcatttctttttcttgttttactgcattcactaaggctacaaaataatgttgaaatgaactgcttatggaagattcctgaaattgttcctgactttgttaagaatgaatctaaagttttaccatttaccatcatgtttgctgtagattttattaaggaagttcccttttgttactgattttctgttttattaaaattgtgagtgaaggtaaaaaactttttctgcatcttttgagatgtttaattttttgtccttttataaaaactaatagtgtggtatattaaattactatatatatagtatatatatgtgtgtgtgtatatatgtgtgtgtgtgtgtgtgtgtgtgtgtgtgtatatatatatatatatatatacatacatatacatatacacacatttttttgaggtggagtctcactctgttgtccaggctggagtacagtagcacgctctcggctcactgcaacctctgcctcccaagtttgagcagttctcctgccttagcctcctgagtagctgggattgcaggcacatgccaccacacccagctaatttttgtatttttggcagagatggggtttcgccatgttggccaggttgaactcctgacctcaggtgatccactcaccttggcctcccaaagtgctgggattacaggcatgagccaccacgcctggcctttttttcttatattgaaccatccttgtcttcctgagataatgtcattctcttctacctgtccctgggtaactatttaataccatagttaagaatttgcattcctgggaactcatgggatatcatcagtggcactgaactatttttcatgctacataaacacctcaattatcagtattatcaggattgcatgggaaggaatacagagatctgtggtcataggcatgagagttacaatgtatgccccacaatcatatagaaggcaaacatatcaaagtttgagaaaattctatcctagaaaggattttaactgctttaagatttgcctgtaacaaatgggttatagtttaaagaggctgagtaacactcttagttttaatttaaaaactcaagttacagttatataaggcctttcagatgtcttttctatttcagatgttgtaacagccaacataggtaagattttgttccaaagcaggtattttcatttccttgtttgtgactacaaacacagtaatgtgttgcccgtatccatgcagaaatgcaggagtgggctgatttgtgatgcatcctgcagtcctgcctgtcatcttgaatcattaaatcttccctgctttgcctgttacttgaagatcacccacgtgtggtcccttctgcttcaattgtgggccttctgttgccttctcatgttggggaccaacatgagaagtaaacgaacaacttaatgaagtaaagttctgtttactcttctggtttgaaagataaccatttcacggggcaaggttttctgcactgaatcttctttatagcctgcaacaatattgacttcattcaacaaatatatcttgagctgctgttattaaatcagcaaggagcagcccctgcttatgtgcccaggtttattgaagtcataatggcacatactttaaaaaaacataagatagctatcttaccttcagaggaatcgcagtcagtcacttacagtcaccaatatccgggaagtcagatggtcacgtacctcctatgtgtcagccatcatcagagaccttgagaagcctacagagaaaaatgcttacctctgatatcacagtctgacatagagtctaccagaggacacaatacaaaatgcatatagaaagttaaaatagtttgggcgcagtgactcattcctgtaatcccagcactttgggaggctgaggcaggaagatccacaaggtcaggagtttgagaccagcctggccaatatggtgaaaccccatctctactaaaaatacaaaaattagccgggcatggtggtgcgcacctgtagtcccagctactcgggaggctgaggcaggagaatcacttgaacccaggaggcggaggttgcagtgagccgagatggtgccattgcactccagcatgggcgacagagcaagactccatctcaaaaaaaaaaaaaaaaaaaaagttaaaacagcattatgagaataaaatcacaattcagggacacagcagaagataagtcataaataagatgttggactcatgactgcatattcggtcagactgtcagctggagggagagaggtacagataggctttctgcagaatggatgggaactgcaaaggtgggcctggaggacatttcaggtagaagaaataccatatggaaggcactgtggaaaaaagggggcggtacattcaggtgacagtggaaactacacgtgtaggtggacaggagggcatgggagggggacggggcaaggaaggcctgggaatgaagaggctgaggctgacatcctggggcacctccaaagccagccaggttgaagagttgggagtttgctttgttttttaagacttaacaaataaatatttaaagataatatatagccctttttgaaagtaattaagatcattgattgggaggaaaaatccaataacatttaggaaccgtaacacaagagaagctgcttgcccctcctaccacaagcagtaaagcctatagatgacattgattttatgttcccagatacgtggcttcaaacagagaattgttttaagtcttagtcatatgaatgaagggccttcttcaaaatcaggacttagaaatacagcagcttgtcctgttggccttgggctggtagtcagatgaggtcaagggcttgttttcatgagggagacttgttaaatacttggaagtatacgatgttatcagcaacgtgaagtttgtccctgtgaccacctggctcttgaataccacagccttaaaaatagggaacttcttgatttttttctcataattgaggcttcacctggttagcaacgtcctggtctcttcagtggcaagcatggcaggggacaccccacacgtcatcgtggtagcagtgggaggggacagggcagaaaggaccagagagttgatgtctctgcccgaaggtaccaaggatgctgagatggctctgtgctcgtcagcccctcaggtgttggctctgtcaccttttgctcctttgcccttttcttactcaccctagcatgacccatctgcaccaccatcctcttgcccaggagacaggaggggcccagagacttccttctcactccttttcttttgaaagtgcatgtatgtgttttggacagaggaggaccttctacttggatcagaggtgtcgttggcttttttgaggacgcctctcggtcttggctggagggtggtggttgcaggcaggcctgagaactggatgacccatgcagaaagagccagcacagatgtgttataatacccttcccacctcagcagacatgactaaacaaactctgtctgctttgaacaattaaagcatttgtcagagcggctcccagagagagcgaggccctgcaagcagtggcatgctctcagaggaaagcagtgtgtgtgcggtgcgcgtgcagtccctgtgctgttagcaggctgcctggccgtactccgagaagcactctgcatcgccaccttctgcatttaaacagccagaatgacctgagcttgggtacaggagtgtagcttccagactgtctttcatcagttttgagaaacttggatgctgaattgggaaatgatgatttgctttaaagaaatgcaagaaatgcaaagataaatacaagaaaaaccccaattctttccagtcggcacccattccagacttgatggtgaaatgaatcccctcctctgagaccaaccgctgttgccctcctgaccccaccctccagcagtgacccccactgagccagtatctttctctcttcaatccttcttaataataaataataatttccacgttctacctttaaaatgaagcctgagcctgtaatcccagcactttgggaggctgagtcaggcagatcacttgaggtcaggagttcgagaccagcctggtcaacatggtgaaaccttgtctctactaaaaatacaaaaattagccaggcgtgatggtgcacacctgtaatcacagctacttgggaggctgaggcaacggtgttgcttgcccctgggaggcagaggttgcagtgagccaaggtcacgccactgcactccagcctgggtgacagagtgatactctatctcggaaaataataataataaaatgaagactgccttcctcactcaccgtggtcctggctaagtgtctgctcaccacaggactatggagtcggcagagcgggcttcttgcctctctggctggttggcagggaagggctgaggcacagagaagttattctcctgcctggtgctgtcagcagtaggtacagagtcaagactaaaaccccgttgttctgccccaggtctggcagtctagaagaagggggggctgtgcagggtacccagccaaggcagagtccagaggaagtcaaggaagagtatgaatgtgagtgtggggcagggagcactgtgcattagcctgagaggtggggggcacagaggaacaggtcacttaatgcttggcacttaggtctgagcctgtttatgaatgcactggggtgcaacccacctggcaaggcaaagcaccttcctgaggtcccaccaccccctgtgtgccagtccattactggctggcattagggtgctcacctctctgtagatttccttaagcccaaggggcaatcacatggtccgcaagtctgcatattggtttgcactaaactctaccctgacaacataccataaaaatggtctaggccaggtgcaatggctcatgcctataatccagcactttgggatgccaagggagttggattgcctgagcccaagagtttgagaccagcctgggcaacatggcaaaaccctgtctttgcaaaaaattagccaggcatgatggcacatgtccgtagtcccagctactcgggaggctgaggtgggaggatcacctgagcccaggaggttgaggctgcagtgagcccagatcctaccactgcacttcagcctgggtgacaagagtgagaccctgtctcaggaaaaaaaaaaaaaaaaaaaaagtctaataacagagcagctaacatttattgagtgcttactgtgtgccaagcactgcgctaaacactttgttggcatcattttatcaaatttctcccagaatcttctcttagaaaatgattagttgttttgacttagaaactaaaatattggattttattcctcctcctcctcttcctcctctcccctccgccccacacgccaccctgtaagggactgtggggcgctgcagggctggggttcttgcccccaaggttcctaagagtcaaaagaagatttgctcattcaacaagcgtgtattgagtatgatttctgatttgttgagcatttattgatgcaatgcaccacatgagatgctgcagacacaaaactaatgcatactcgctgatctcaaggagccggcacacatcatctgcaagggacaaaccggaagtgttgtgtgctatggcccaaaacagaggaggaaacggaggaggacagagctgagtctggaaagaggaggtggaggcagagagagggagatggaatcagtggtgaggaacacaggcttctcaggctgggtgcagtgcctcatgcctgtaatcccagtgctttgggaggccaaggtaggaggattgcttgagcccaggagttagagaccagcctgggcaacatggcaacgtcctgtccgttcataaaattcaaaaattagccaggtgtggtggtgcgcacctgtggtttcagctactcaagaggctgaggcaggaacactgcttgagtccccaaggccgaggctacagtgagtcatgactgtgccactgcactccagtctaggtgacagagtgagacctgtcgtaaaaaacgaaacaacaccagcttctctcccaagaaatgaggttaacaataacaccatctccccttgtggcaaggatgggtctagatactgcatgagatgtcgttagcatggtgcctgaaatgcaatcagcagttggtaaaaatgaattattttgttgagagttaaaagtgctttggaggaggacctgagtcttgttatctttgcaccaccccagcccccagagtcagcactgcctcacatgaacaccgtgccccaggatgctagctagtaaggtgtcacagacagggtggcgaggagaagcaagccccagcctgagcgggaatgactggaggaaaggtcagagacagagcagcccggaggtgcgctggtgcgcagagcagacagtggagggttcagtgggcagtgctcttcaccccgggtctgaataatgcccggggcttgggaggcccctttggctgggcactttctcagggtggccatgctgagctgctgacccccaagccctcctctccagctccctttcatcatcaccgtgagtgttcatttaaactcagcaagacccatgccaacaaaaacaaagaaaatgatctcttagtggttatttatatggtaaacctcctctggggtgattttttttccagtccagcttgcaataatttcttaagaaagataaagtgatttttaagtgtaattttaaggagcaggcccatacgttagcttgcttgctgttattcttctgttcatgttgttcacaacatgaactttgatttgtcttctccaggtagtttgggaccacagagaaaaatcccccttctgttaaaaaaaaaaaaaaaaagccattacacaaatacttgaaagcagaaactcttctctgaaatcttctctgaaatgacgaaaaactcattaaaaactgcttcctgagaaggtagaacagatgcaagggaacacatggagctgattctttaaagatgttattttttgaagccacagttgttatttcttttctgttagccaaaatgtagccttacattttgaacttagcacctcatatttatcagcagagaaacagaaaagagtaaaacaaaagaaactagaagcagaaaactctgaattgtttataaaatgggctttaaaaatacttattaagagaatgaaccatgctttcctattttgctcttaaaaatttaagcactttcaagtgatggctgattaaaaaaacttggagcgcatcttgaggcccaggtttcccaccatcagaaatgtgcagccacaaaggaaaagtccagaatttcagcacttgtgagccgtgccactgtcagagttggaaaagtactagccagcagaaagcctcctcctccccccccaggggaaagctgccagcctatccagttggcacagccatgcccctttgcccagggcttgtcacctgcacacacagatgaggatgttcaatctgaatgagaaaggaactggagattccagcagcaccctaggtctaggagtgaaaagctcccagagtcttagcactgtgcccttctgccgcaagctggactgagtcgattctgcggcagcaggcagatgcccgttctgcaaaggcatctatatttaggtagggacaccagcttgccaaggtaaagaagggcatgatgggcgtcgcctcagaatgctgttggtcttggaacagaggccctcagcatctgtcctcacatcttctgctcacaggcaggtcctgtgttgccctgtgggttagacatgctcatggaggagaggacacctccccagagccaaggcggtctggaacgcatcagggttcttcctgaatgtgcgtccttcatgccgggtggctacgtgccgccaggcagggactgcatactgcggtttcgtagtcgctgtgctaaggggagctgccacacgccgtctgttagcaggacatggagttgggccccaaatggccctagtggtgtcaaaagcagatgtcttcaacccacagtgggacgctgctccctcccagcgcagcctggtaggcctcttgaccacctggggggagtcactgtctgcctcgaggcacctggccactttgggactgcacagcaccccttctaccctagggaggagtagctcagctcagctcttcttccccaggctcagcccaatgcgcttcaggcccacgtaggcgcagccctgctgcggaggcgcctctgcctttccctttgtgacttcctggcagaagcctccactccagctgcaattcagtgctcatcttgcacattctcatcccaaggtctttgctcccttaatggccccagctgtatggtcctatccctgcccttgcgggtcacctcctcaggaaatctgtaaaggcccagcggattcttcctaagatgtgttgcttgggggccccccttgaggctgacatttctgctggaatatttcatccttcggggcctggacccgggccatgccctgctgagccttagctgagtgcccagccctttgccccctctagctcaggccagtctttgcaccccttcatcagacaccctgcctggtgtcatctgaggtgtcctttacctgcctggctggactgaaggctctcagagggaaaggccatctcgtgttactcatctctgtctcccagtggcacccagcatggtgcccaagtccctgtggaggaaccctggcttttgtgattctcaaagtcttctgcgtcggccctccctgagcaggtttgtatggcaatcacaggggccaggcaggtctcagagcaggctctctttgatggattagggggaggtggtgacagtgggacagtagccctgcctggggactctcaggccagtgaaccgaggggacagctacaagccctacaggaggactcagctcttcagcagtggacttgactgatgattgacagatgaggcacacagggtccctctgaggagggctcggccctctctcttttcaaccaggctccttggtaaagaagcgggggcgtgcgctggggggagaaccttgtgttctcagtcttaggagagctgttctcaattcccgccttcccaagagccctctggggcatttcagaactcccgtggacctgccagcttcgcacccttgcttgaatggtgaagcatatcagtcctttttaaagagtgtctgcagatcccctaaaacaggagccccaaagcttatgctccttagcagagaaaagatgattccatgtgggatgacgcagcgttgcctgccaaaccagccatcaggccatccagtgcagctgtgggcccaggagccccccaactgctggggcctccatctccatgggttctaaaggaaaggggcctcataactggctagttggggcaaggagaccaccctcccagcccagccaggctgttttctcagggctggtctgtgagggggaggaattagaaaggactgcccccgggccaggggagtgggattggaggagaaccgagaggttttcagtagattgagaggctcattaggggtgaactaggtagccaaagaaacatctttaagaactgcagttactgaatacagcccctcatcagcgctgaggttggtccacttaacctttggtccacttaaccttgctatcaatgtgggctcagggaatgtgcctgccaggacaggaagacagccttgggctaccggctccacctggccagcgccctgttcccacagcaggaccagctccttcctaactgcttttgttttgtcctgggacagagcctggattttgggttaagtttgtgccttccaggctggggaagaagccaaaacttctgtttcccatgcaaaacgccaccacacacctagggaggatgtttgtgttccacggaggtcgccacccatctgttttcagagtaaacgtttgtgtgagcgcactctggcggggagtcccgagagcggaccctcttgccactgcacccataggtgcggaacgaacctgctgccccgaccctgcggctccgaccggggccgagcagcgaaggaccaccctggtctggtcacctacgattctgggtccagctcagctggtgaccttgcttaggccacacccctctctgagcctccatcttcccttcagcagctgtgtagggtgaacttaatgttgtgcaagatcatgtccagctctggaattttaggattatgagcttatttacgatcagcctgttgattctacctctaaaatataatctgaacccgtatactcccctccatgtctcctggtactccatgatcttgtcgcttcctgcccgagttctgcagtttagaataaacccaggcccctctccgcggaccctctgatggcagacctccatccctctgcacagggcctcacccacccagccacgtgctctgctgtcagccccccggagcccctgggatctttgcacctgctgttttctccgtagagagctgccctccctccactcctggacgggctggctccttccttccttcccatctttcagagctcagcttcaagtgttggctccactgagaggccttacccccaagtccctttctaaaagaactgttcctccatcattccacctctcaccccatttttttcctatattttgtagctctttccttgggtggatctggttttgtgttagtctcttgtcacctccactaggcagggacctcccagggcagggacggacgcacctgtcccagtcatggctgatcagcgagagccaaacatatcatagcacatggggtactgtaggtgttcaaaggatgctggctgaatggatggagacttccttcatagagccccattttccttcctgatttcttagtctcagttcccattttctctcaaagatccaggggtcacaatgagagtgattataaaacaaactacacatgcaacacgaactcctcagtcaatcccaagagggctctcactccacacttcatcatctgccctgtgacctcagattaaaactcaggcttaacatttcctgaggccctgctcggtgccaggttctgggtctgtgctttccagttgttttatgtatccttgataacctctgtatggttggtggtaaaatggagagatgtattttcctgcggggaaactgagtcctgagaaacgagctagcccacagagagctggtggctggtagagcccggatccaaaattgggagcgtcttgccccaagtccagtgctgtttcctttatacccaatgccacagagccaaagtggtacctggccgagatctggccctgaatgtagaagaggccagggaaaggtggagggaagagggcataggtcccagtgtgggattccagatgacccctgttgtccagctggctaggagatatgtggaccccagggctgacagatgttcctgagggccacagggaacctgacggaaggttggtggcatttctagaggcaagtggtcagagagagcatgggggttttgtggggactgggaataaccgagggcctcgtggcaggctgggtggcactgccctctcaacgctgacctgtcagctggttcaggaaggcctttctgaggccagcacagactctatcacaccatggaccttcaagggatagctctcttggcaaaacacccttttgccagacctaattgccagaagctgcagtggaaatgagaacccaggacatgggacgagacagacctatgtgtggatctcagctctgccatttgctagctgtgtggccctgacagtcacctgccttgtgagctctgagttccttaagtgtaaaaatgccatggtatggtagagaggaaagagactcatatttgaatatgacacagaataggcccttagtgccagcctcaggggctcacacctgtaatcccagcactttgggaggccaaggcaggcaggttgctgaagcccaggagttcgagaccaccctggtcagtgtgatgaaactccgtctctaaaaaaaaaaaaaaaaaaaaaaaaaaaaattagccaaaaaaaaaaaaaaagccagatgtggtggtgcaggcctgtggttgcagctacccaggaggctaagatgggaggatcacctgagcctgggaaggtcgaggctgcagtgagctatgattgtgccactgcacacatactgggcaacagagtgagactcttgtctcaaaaaaaaagaaaaagaaaaagcccttagtaattcttgagaatgagtgactgaaggaaggaatggacacctacctaagatgtcctcctggaagagagcatggagaagggatctgagcttcttgctattttcaatgtgaaaagctttaatctggctgtaatacaaggtcgattacccacagcttccaagaacttaccacaaaatgttaatgatatcaactgagatttttttttttcaggttgtaaagttgtgttctccatcattgtaagcaagtaacaacacagatgatgtgtaccctgcatcaggtgcagttctgagcactttatgcccactaactcatttcatggtcacaacagccctacgagggagacagcatttttgtcctcatttctcagatgagaacacagaggcacaaagagattaaataaatagcctgaggtgacatagctagtcagtggcagagcaggacccaatcctggaagtctggcttcagagacagagctcttaactccacctgatagtgattaatggctatagcagaatcagatcagggtaagagaaggcatggcactgagccggggaggccagggaaggttgggctggaaggattctgttctccttaaaatggttgggaaataagacctctaactaaatgagtgggagactgcgttggtgctttaggggaagtgggcctgctggcggggggtcgcccactttccacctttggtggttctgaaaaagacacggtatttctcttatgacatttttggtaattattgtaaatatgtttttatattgtgaaactccccccgtcttaagctatattcgttttctcttatgaatttaaaaaataaaatctattgatgcgcatacaatcaaatatatgtaaaagtgcacatttctgagctttgagaaacgtactcgcttgtggaaccagcacagttcggcgacatcgagcaggtctgtctggcctgtcctgccctgcacagccgcctggaggttcacctgcatcattgcgtgtgtcagcgcttggtgcctttctgtcgctgagtagcgtctcgctgtgtgagtgtaccagaattgtttactcactcacctggtgagctgttcttgggttgtttctagtttggagctgttataaatgaagctctgatgagtgagtgtgttttcacttctcttgggagattatctaggactagaattgctgggtcctatggtggaagtgtatgtttaacttttaagaaactgttatttttcaaattcactgtgtcgtttttgctgttgccaccagcagagtttgagagttctggttgtgccatgtgcttgtcagcacttggaagctggtagtccttttcattctggccatttgagtagatatgcaagtggcatctcattatggcttttattgtagttctctgatgacaacatctttcccgcatctctgatggggaacatcttttcatgtatttatttgccacctgtagatcttcttatgtgacccttctttcaaatcttttgcccatgtttccatcgggttgttatatcttattgaactgtaagagttcttccaccctgagcaacatggcaagaccctatctctataaaaaataaaaataaattcactgggcatggtggtgcgcacctgtggtcccagctactcaggaggctgaggtgggaggatcccttgagaccaagaggtgaaggctgcagtgagcagtgatcgcaccactgtcctccagctagggcaacacagtgacaccccatctcaaaaaaaaaaagtcttatattttctagacatgagttttttggtcagatattggtattgcatatattttctcaatgtctttggcttgccttttcattttcttgatgttgtctttaagagaggaaaagttttgaattctgaagttcagttaataatttttttctcttacagttcctgcttttagtgtcctaagaaatctttgcctatgtccaaagtcttactgatttttctttttttttcctaaaaaatttatagttttagctttttttgggggggggagggggggagtcttgctctgtcgcccaggctggagtgcagtggtgcaatcttggctcactgcaagctccgcctcccaggttcacgccattctcctgcctcagcctcccaagtagctgggactacaggtgcccaccaccacacctggctaatttttttgtatttttagtagagacggggtttcaccatgttagccaggatggtctcgatctcctgacttcgtgatccgcccgcctcggcctcccaaagtgctgggattacaggcgtgagccatcgcgcccggctggttttagcttttacatatatgtttgtgattgatttcaagttaatttcatgtagggtatgagttaagggtgaaagttcatttttctctatgtggttatctaattgttccagcaatgtttgttgaaaagattgtcctttctcgtcaaattactgtgccacctttgttgaaagtcacctgcccgtgtttgtgggtctgtttctacctctgtattcctggttatcctcatctcagtaccaaactatctgctgcctgaagctttatagagtcagtgggtcagtgtctgccttgttacttggtctccgatggtccggcccagtggcagaggatgtcaccttgccagcacatgcctccctaggattggatcatgcccctctcctgagaagccatgtcacctgcatttgcattatttgaaggtgcaagatgtcccttctcaccaagtgaagttggtgtgtttatatcctgcgtcctccccacctcaccctggaactctgagctctccagttttcctcctcctcttctccctctctctgatgttgaccccaaaagccctttgaggtagagaacaaacatgtaaaagtgcctgcctttttaaagggaaacttttcaaaaacttttctaaggaactggaaataagaactacgtaacagaaaccatttcacaaccttcagcatggccatttatctcaataaccatttcgtttaaaatgtgggccaaacatataaatcatatcttgaaagaaagcatgtgggtgccacaaaaatcaccctgtattcttaccatctaattttaaaaatgtgtttcgaagcctggaaaaaggcaaacaagcctggggcccgtgccctcctcccacagggccagggatgcagcggagaggctggagcactggacagcataccccgttgctagccattcgcgtcagcgacaggagccactgctcttgaaacctccctcctctgcatgtcacttggtagatcaggagctgagagccccaaaaccagtctgcttctaaccagtgcttggacaagcccttgcacttaggcagtaaacactccaggagagatcgtgtagatattggtgcttatttagcgacatccccagagggagggtgccaaatatagcgggaccctgaggtccattttccagactaataagagggggagacctagagcagcctgtcgctgtgggctgggaattccagagtcttctgccggaaacctcactaaggattgcaaggctaagatgtcagcatttcctcttggcaggtttcatatttgcttcttagcacttcctgggagggaaaaacaaaagacaccggcagatgtaccttgccatgggccatggcccttcctgtggcccgtgtacctctcacctgggtccctggagacaccagtatccccactgctacactgacccttttttctcatctggtcttccatatttcctctttcccagcctagtagctgctctcaaccaccctctgcttccctcttgctcctcctttaagatgacagtcccctgggcatcctcccgggcaccccctcccgggcgtcaggtctctgtttccagcctgggctctgttcttgggagtgaagaaggtgacgtttggaacggctgagcataacctgtgcctcaagtgtagctcggaggtgctgaccttcctctgggtctaggttctgaggcatgagactgttccttcagactcctagctccttgtcagttgcagccctgagcatctttgtagggggagtggggaggatttgggggatggaatgcctctggaggtggcatgccagcccacacgtgtgcacaggcctggtctgctgcccccctccctggaggtgcctttaatcagctgcacaggccacagttagatggcggcgtcctccaaccgaccccacggtgcaggagcagccccaccctgccaacatgaaacctgtcgttttctccttttaatctcctcatccctggctgcccgatgttccttgtgtaagtcacgctttacatcttaccagccgccttggccatgactgtctttgtagtagaaccttaaccttgttcctggaaccccggagcagtgggtgtcatggggcagtgcacgtgctctctggactggcagcagggggctggggttggaaaggctgggagaactcctccctcagaagactagaagtagcccccacagttctgtttccttcttgctcccatcttcccccctgcctcagccctcagctgcctgtgtctggagagctgagtttggggcaatggttccctgagaagaggggtttggtcttaattcctctgccaagtctggtgcccaggctcgaggaggcagtgagtgcttagagtacaagagtgggaaggcaggcgggtgtctttccaaagggaggcaccggggtggtgtgttaggaggagcacaaggctggccgcggtggctcatgcctgtactcccagtgctttgggagactgaggtgggcggatcacctgaggtcaggagttggagaccagcctggccaacatggtgaaaccccatctctactaaaaataccaaaaaattagctaggcgtggtggcgcacgcctgttatcccggctactcaggaggctgaggcacgagaattgcttgaaccgcggacctctggggacgggagggggaggacccatttcatctctgctgaaggatggtgacaggctggggatggagggtgggcaggggcaagggctggggctgctggcagcagacatcaagggcacccaagtccctacagggcatgaaccatcagccccaggctggcctcaccatctgctctggccttccctgctttgtgcagtctgcctgctcccttccctcttggttcactccttcaggctgctcatctgcccgcaccagcagtctgaagcagtcacaccggccatccttggcccaggggtgaagggatctgggagcttttgcttctggattcattgtgagagtaggcagggctaattctgagttgccccaggtccccatgctgcgatggggctccgggcaggaatctgggagccaggaagtcagaccctgggccttcacccggcagcacttccctgtggccctctccagggcccaggtatggctgcaaaagcagacctgggtccagcaagggaaatggttaacccgtgaggccccccatctgcagagccccacagctactgccttgcagagcaccctttttctgaccagccccaatcctgcctggggcctcttagagtccagaagcaagaagtacccaccgctgtgtgtccctgtggcctctggcccagagccaacccacagtgaggccaggaaggggaatgagggcgtcagtggcctgggacccagacttccctcagaaagctggcctgccaccccagctgctcccgcctggggatgctcacagtgcttgcccccgcccacccctgtccttctgggccctggagtccaagggcctgacgtgctggagtcctcagaagccagctgggccgaggggcccgcccttgactgtgtgtgtctcaggtattatggtcacaccaaaaatccccctttcttttctgccctatggaatcatatccagaacagatggttctgaatcattgttcctgcaaagcctctctactagaccaggctctgagccggggctggggatacagtggtgaccagacagaccaggccctaccctcacgcagcacgcagtcccctggggaagtcagatgcacagactacaaggtgacagcaaattatggtggggtcgcaggaggaaccaagagggctgagaataaggtaggccagcagggaagtcgctgcagacccagcggagccagctgtgtgggaggggctgcggagaggagctttctaagccaaagaagcctgtgaaaaggctgagcaaggggagagccaggaggctgcggccgctggaatctggtgggccagagagagggtgccggggtggggagcttggaggggtgtgcagggccagggctgggggcctagggccctgaagagtttggacttcactctccctctgtgcaaggggaagattttgaaggctgcaaaacttgggaaagatgatgggattgtttttttgagaaattcagtctgatgccctgtgggtggaacagtgccagaggcttatggacaccccagaagaaccacggtgacggatacctgtggggacaacagatccttctcttgtgggcatcgagagcctgcgcagtgaccctggagcgagccctgcctcccatcctcggctcccggctggagagtctccacggcctgcagccgctccttcctctctgctctttcctgcccctgccaggccacctccctgtctcttcttgtccataaacctgacctaggacttcacggaccaagccctaacccacagccttctggccttggcagccccgccagccctgtcccctctctgggcctcggggctgtgcttgggctccgtgtcccgagcagccctgccaggcctagctctcctgggcgtgtgtctctctgttgtcagcccccctggcggttcttccttggaatcatcttctggatgtcccctctcctttttctcctctagtccctgtagccaccccctggcagtgctcagtaagggctagcaaactagcagcctcctgcagaagaagtgggggttagcacccccatacccccattgtttcccggaggcattttgggaggccaagccagaggattgcttaagcctaggagtttaagaccagcctgggcaacatagggagaccccatctccacaaaatataaaaaattagctggttgtggtggcatatgcctgtagtcccaactactaaggaggctgaggtaggaggattgcttgagcctgggaggtcaaggctgcagtgagttatagatggcaccacactccagcctgggtgacagagtgaggccctgtctcaaaaagtaaagaaatgccaaaactggatttttttttttttttttttttttttttgagatggagtcctgctctgtcacccaggctggagtgcagtggcgtaatctcggttcactgcaacctcttccttccgggttcaagcaattttcctgcctcagcctcccgagtagctgggattacaagcacatgccaccatgcccagctaagttttgtatttttagtagagagggggttttgccatgttggccaagctggtctcgaactcctgacctcaggtgatccgcctgacttggcttcccaaaatgttgggattacaggcgtgagccactgcgcccagccttattttaaatgtttacatttaacaaatgaacgcttttaacggacacacagaaatataattgtgccattcccaaggtaattacagtgtttataaaagaagaaccttagttcatggcatgcttcaggcagtgtggtccagaaatgggacccaagtttgaaattggatgatgagggctcctttcaaactcgtctgtctcctttggagagagttaaacctcaaggccctttgggtgtgtgtggtccaggctgagccttctccctcattccttgtgatgggcccaattgaaaggtccctcttcccctaatgcagagtggcagcccatccctgccctcttccattgcagggcagcggccagtggggagcgctgaggtgctcaggtcaggctgaccagaggggctgagcccacccttgccagcggagagcagcacaggctgatgccatcctctccctaactgtccaagccatgggctctgccttctgaactgggtcataccaaggtggggacttgggagccaggtcaggagctggcctgtcctttcggctgcccaggtttattcatggtgctggtgggtgtgtgctgttgctcttgggcacctattgtgcatttgcgtgacaggcggtgaatggaagagtgtctggggcccagagggcagaatcagagactgtccttaatcgtctttagagggaattatgtttaacaggaagtagtgagagaaagtggaaaaggcctcttccttcgcccttgctagcttggtctccttgacaagttctgctgttttctctgtgcttcagtcccctactttgtaaaatgggggcaaacatgtgacaccattgtcctcagggctgccgggaagagagtggaggcaggggtttgagtgacattcccctgtgtggacagaccacgtttcatttattcatcagttggtggaaactggattgtttccactcgtttcctattatgaattccacgtttaacttttatgaatactttcctatgaatactactgtgtttgtgtacaagtttttatgtggacacgttgtcatttctcttgggcagttacctaggactggaattgttgtaccatatggtaactgtgtttaatttttggggtaaactgccagctgttttttatgaggtggctgaaccatttcacatttccagcagcaacgtatgaaggttctagtttgtccacatccttgtcaacacttactatgatctggctttttcactgcagccatcctagtgggtgtgaagtggtagcttatggttttgattcacattttcctgatgactaattatgtttgagtatcatttcatgtgcttcttagcaatttgtgtctttttctggagaaatgtctatccaacatctttgcccctttttttgttttgttttgtttttgaaacagggtcttgctggagtgtaagtggcatggtcatggctcactgtagccttgacctcctgggctcaagggatcctcccacctcagcctccagagtagctgggactataggtgtgcaccaccacacccaactagtttttaaatttttttgatagagacaggatttccctgtgttttccaggctggtcttgaactcctgggctcaagtgaccttcccaccttggcctcccaaagtgctgaaattacaggcatgagccaccacgcttggacttttgccacatttttaaattgtgttttctttttattattgcgttgtaaatggcctttgtattttttctttaatttcttaaagatggggtctcactatgttgcccaggctggtctcaaactcctgtctttatatattctagatacaagtctcttatcagatacatgatgtgcaattattttctctcattctgtggctatcttttctctttcttaatagtgtccttggaagcacaaaaattttaaattttgactaactccagtttacttattttgttgttgcttgtatttttggtttccttttttagtctttaaaatatataagatatatgattcaaaattaaaaggcatgctcagagcagtctcgccttcatccccacctgccctctatagggaggcatttaaattaatttctccttttatcgttcctgtgtttatatttgcaaaattaaaaacctttttttcttaaacaaaggtggtatgctacagatactctgcatttctttcttcttttctttcactaaagaaatcccggaactgagcccccgtatcagccgattgaactcactgtgtttcagggccacagtagtccaggtgtggatgtgcatcaaatggtttagtcagctggttccccgctgagggcctcttgggcctgttcccagtcttttcctgtaagagatcatgcagcaggggataatatcctttcgtatagtggaggtgtgtcttcaggacagactcctaaaagtgagacggccgggtcaaaagttaagccgtaggaatcgtggctgttgccagattgtcctctgcaggggttggactgctctgtgtgtcaccagggaggtatgagagtggttccaccacaggctcacaaacagaacatattgtgaagcagtgaggttcttgccagcgttatctcagtgcagctttttttttttcaatcagctgtattgtgtgatttacatacaatgaaatacacccactttaagtgtccagtttgttgagttgtgacaaattatctacttcctgtcaccacagatgggtttttgcccttgtaggatttcatataaatgaaatatgaagtatgatgtcttctgtgttagggttgttttcttaaaaactgtatatattcaaagtgtgtaaggtatctttatatcacatagtgaaatggttactacagtcaaggaaattaacacatctgtgaactcccatagcatgtggtgagagcacctaaaatctactcttagcaaatttccagtgtacagtccagcatgattaacagtagtcctgtgctgtatatcagacctccagactattcatactacgtaactgccaccttgtacccctcgtacccttcgaccccattccccaccccttccagttgggcttccttgacccaggataaagacactgagattcatatgtgttgtcgcacccatcagtagtttaatggcttaggagtatccactgtacggatacaccacaatttctctgctttcccgttgatgatcatttgtgtggtttctagtttgtacctattctgagtaagactgctgcggacattctggctcaagtttttctgtggacatgtgttttcgtttctttggagtaaacaggagtggaatggctggatcacatggtgagcgcacacttaaacagtcactagaccttcctccaaagtggttttgccagtttccatccccactaggagcagtgtgtgggcccttcctgccccacatcctcacagacatcgggcatcgctggcctttagcttcagctctccgaggaggtggggtgcactgtctctttatggttttgatttgcatttccctgaggactgcaaactgcacgtcttttcttatttgccattatatttcctctttggtgaagtttctcttccaatcttttccccaaaaatcaagtttttgtctctttattattaagttgtaagagttctctttattttctaaatacaagttcttttaatatagagatattttctcctagtctgcaacttgccttttcattttctcagtggtatccttccaagatcagaaattttaattcttgtgaaatgcaaacccatttttttttctggttagtactttttgtgtcttaagaaacctttgcatttcctttattatgagtagggctgtgcatctttttttttctgtttaagggccatttgcttattttttctgagaactggccgtgtctttgtccactttttaaaaatttggtctattggtctttctcttcttgaattttatttatttctttgagacagggtctcactctctgttgcccaggctggagtgcagtggtgcagtcacagctcactgcggcctctacctcccaagctcacaccatcctcctatctcctgagttgctgggactacagacacatgccactatgcctggctcatttttaaaaaattattgtagagaaagggtctccttatgttgcccaggctggtcttgaactcctgggctcaagtgatcctcccgcctcagcctcccaaagtgctgggattataggcatgcctggcctctcttcttgatttctaagagctctttgtctattaccgagatgagccctttatggtatgttgttatgttttctctcagtttgcctttttgactgttttcccgtgcatattgcatgcatgtgtttttgcagagtccagtgtatccatttttttattgcttatggatttgggatcataggccttccctactcccaggctataatgagcttacccgtgtttgtatctagtattcttatggtttcattttctctaacgtttggatttttatcccatttggagttgattctaacatgcggggtaaggcatggaatcaattttatctttttccaagtgactctctacttctcttcatatcagttttttaaaaagtctatcttttcgtaatgagccgagatggcactccccaggccattatcattaaaatccttgatttccacatgttcttggacatggtcttctcgtttctgtactcgtcgtgtcctgcgggccgtctgagtgttccgtgctgacgcaccctctcctcctcgggggtttcatggcgtctccctcggcccatggtgggggcttctcaccgctcttctgttcggagggtttcctgggtgtgtctgcttcctgtttttccacatagcctagaaccagctcgcccggctccagaaaacatttgttaactttgaaaattgagactttgttaatgtattcactttgagaaagctgacatctttatggatgttgaatcgtcctatgcagaaacaaggggtgtggctctatctactccagtttacgtctttccaggagagattcttctaggactgtcgcagctgttttagaggcttcatatggattctgtacatccgatgttaggtttattcccatgtgtttagctttttcactgcttttataattttttttaaagtttttatttttatagagagagggtcttgctctattgtccaggctggtctcaaactcctggcctcaagcagtccactcgcctcagcctcccaaagtgctgggattacaggcacgagccgctgtgcccagccaatataatgggttcttttcttttcttttttttttctcgaggcagggtctcaccctgtcgcccaggctggagtatagtggtgcgatctcagctcactacaacttctacctcctgagttcaagccattctcctgcctcagcctcccaagtagctgggactacaggtgcccaccaccacgcctggctaatttttggatttttagtagagacggggtttcaccatgttggccaggctggtctcgaactcctgacctcaagtgatccacccgccttggcctcccgaagtgctgggattacaggcgtgcgccaccacgcccggcctctttcattctgttttgaactaaacattgtttgcactgcatgtggtgggttataattggttgttgtcaattttatatcttgctcttactaaatactttttcatttgtattctaaggatatcttagcacttattttattggggtttccaggtgtgctttgatattacctacaaagagatcatttttccttagggttgaatgtttttaaaggtttgtattacatattgccaaatcttttaaaaaatatggtaccaatttatacttctcttgtggcagtgttttgccatacccttgtcggcactgagtattgatattttttaaaatgtgccagtttactatgatcttcactaagaggacattcactgtgccccttctccacaccagttgcactgccaaggacacagctgcggtgaggacacagtagagcctgcagatcccagcccccagtcccactccagtccctgtccctatccccaggagtccctgttctggttatttcttgaggtttcaaatgaagatggctgctgccctctgagcccagccaatgggacgaagccagtggagagcccgtccctgccccagagattcgctctggaaaatccctgagtggttttgtaaaatgcattttacaaaataataatccccgcacaataagtcttctgggtgtctcgcaggatcccctgcacagctcaggcactgccagcagccgcatcccctcgagtggctcaatctgtccaggagcaaggggtcagccaggcaccttccagggccagtcccaggccacccagtcccagtgtggctgagcacctatgcctcttccccatagctaaaaacccagtaaaatggatgataaaatgggtaacacctccctgaaagtttctactttcctataaagcccagccccggcccaggcccgagtcctcttatgaacagaacaaccccaaccacccatttgcagagggcactgctgtttggtactgaccctgccctgcccaggctggcagccctccaaggaggctgggcaggaggtcccggaggacacggcccacaatgctcacccttttcattctccatcttgccccatcacctcccacctcggccccttcctccaggcagcccgccccgcccttttccacacacccctggttcccagcactgaagcttgcttgctgtgtgatctcaggccaattgccttacctctctgggcttgtttccatcttcacctcacaggtagatgtgaggtcacctcacaggtagatgtgaggagtgaaagagggagtattcgcagcaggtctacacagcgtgtggcacagagctggctacatgaatgtgtgttcgttgaatgggagagtgaaagaatggatggattgtgctggcaaaccctccaggggctcagtttcttccactcggaccatcagaacccagagatcagatccaggagctcctaaatgcaacctttgttagaaacacagctcccctgccctgcactgctcagtcccaccctgggggagtttccagccgcactgaggatgagctcggtggggacctgacccagagatagggacacctggtcactggaccgcagaccggcccatccacagcctggctgggctggcatctagacctcgcttggcagtcccctcccaagagctcagatagtttggcctcgggagacaggggcagtgagaaggctgcctcccctcagcctgggagctgggtcctcaggagagaggaaatttccttctatttattttcgacatcctcgactttgaaagccaagctggtgttgatatttaccttggccaggcctcccatctccccgggccagcctcgtgtaaacatgctgttccttctctcagctctgctagcactgaggtggccttttgcaaccaattctaggaatttggaagtctgaaggcgtaggttcagggactggccctccagggagccctgggtgccaggggccctgggacctgctgtgctggccttgggctctctccctgggggctgacaccaaggactgcagggaatgaatgggcctgggcccatgggggtgtcggccagggtggctcttgctgggtccctcagttctcctcacagccacgttggggcctcctgctccccaggttcactgcgaggctcagactcggaggacacgcattgagggactgtggcaggatctggctgtctccactgtctttgctccaggccacctccaccctggctggtggggagggcttgctcttgagccagctctctagtgtgagttgggagtgtgggcagctggactacagttagagggaacatggagcaggtgcccagggtgcagcctcccaaggcagcacgtgcccatgccagaattcctgccctcagggagcttgccttccagagggcaggtggaccacaaggagaacaagctggcttggggtgggggtgagtgctgcagaagccaggatgagcagaggctggctgggtcagggacggtcccccgaggtggacatgcaggaggtgagcagaggcacattccccagtgcaaatcccagccctcccctgttggttccaccaggtggttcacacactagtgacgccttggcaagtctgagatttggtttccttgtacagaaatggggtgacagtccctcagaaacaagggagtggttctgcaggtgggagctgccatgactgctgcggttttgaagcatctgtgtgccccccaccgggcagtgggacatctcggctgagcctctccccttctccatgcagatctgggacatgagcgatgatgagaccatctgagatggccccgctgtggggctgacttctccccggccgcctgctgaggagctctccatcgccagagcaggactgctgaccccaggcctggtgattctgggcccctcctccataccccgaggtctgggattcccccctctgctgcccaggagtggccagtgttcggcgttgctcgggattcaagataccaccagttcagagctaaataataaccttggccttggccttgctattgacctgggacttggtcctccatgcagtttttatttcttgtcacagtgactgatagccatcccccaggatcctttccccttggccctgagggggtgacccaacacagaccaaatggggaaatgagcaaccagctcctgcccagagccactgcgggaggtggcaccctcatccccggaatgtgctgcccaccgcaccgcaggctcctcctgtgggggccctgggcatgggtgagggtgggaccccgtgagcgcactgcaccctggccctggtggagcgggaggaggaggagagccgagctgggtacgagactaaagggcccacatgacccagtgacgccagatttccaccaaggactgagtgagctgctcagacatggctttctgcctcccagcctgtcctccactgtgggcatagcatctgtgcctgcctgcctgcttgagggagaggagtttctgctgctgccttgagctggggggaagagcccaggggcagatcctggcagctgcctggatggggctcctccctgcccttatgagcaggccaggcccagaaaggccgagcctgggctgccttcctgccccagccgagggaggggtcagacggctctaccatgggtaactcaggcaagagctggttttcctctttattctgggtgtgtgcagctgtgaggccccaacccaggagaggccatggcctaggtacctgtgaccaccctgcccccgtgtagagggcatcgtctttcctgctattttattctttcagcttttgtcttaggcccagaatcaaagtgaaaattgagtcgagctgacccttacaacagtaggatttagtagggtagatttcaaatgaggcttcgcttctcccaaagtagccagtccaagttccagtggctgtcgttcagctcatgggagcttcatggggacacagccggcacaggtgcagggcccgagtccgcccacccagcctggcgctgaaactgcacacgtacactatgtggtttaagagcactttattattgttcttaaggctacttttaagtacaaaaaaagatggcctgccaaacctttttttttcttcttccaggaaaaacaggccacagagaatggtatattacagatttacacacatgaagagaaggtcagagcgcactgcaggcagcgcggctctgggaagaacttcacggagccccttcttagagcagggagggggctttctcagtgaaatgtttggttttctgctgcctcctctgccccaggcccccctccagggtactgcctatcccagataggtcagtgcaccagggacccggccgccagcaccgccgacccctcccagagtgacgcccttgttcactgacaaagagacctgtcccaggagtgtcctccaccgagccggtcagctgtgggtggttttcctgttacgacgctcagtagcctgtagcaataacaaactcgtggctatgaatgcagatgcagtgttctcatagaataactgttcctgcacttttacagacaaatctacgacaaaaaaaaagatcaactttttttttccgaacaacaaaaaaaatgaatgattacaataggaaagggaaaaattaaatagctacatatcattaacaaattaatgttcttcaaaaaatacctacaaatttctctgtacattctttacgcacagcgtaacgatggtctcaaaatcacccatatagaaaagtgttctcaacgatttttcctacagaaaatataggggcctgaatgccaaagcttggaagcccagtacagtgggagtgaaatgtgtgcggggcaaggagaagggcttttctttcctccacttttcaaaggcctgcagccactctgtgactacaagagccagtcctccgaccttttcacccagtgccaatttccaaaattcaacagctaaaaactgtaaaaccgggggtcatacggtgtgcagagtccacaaagccttgcaggtgaggtgaccacgcccacgtcacctggtcaggtgccatcgtcgtgagcctctggtgggccaggtgggacacagcacaccccagggggaggggatagaaacgctcattgaccaaaaaggagcagctgtgacctccacagctgtgtctgtcatgcttgcttcatctaatttctagttagtagctattaatatagcaaataataaatgcagtaataacagtataaagtcagaggaatgtatactgccttggccccagcgtacgaggaagcgtataaaacaccatatcacagattgtctgtcagtaatctgctgttcagccaagagagttcaaagggagcagtttctgcatgtagggaagttggaagacacaaaccccacctcccctgggagcttgtaacaaagcagacagggatgcaaaaataaatgatgtcagcctgcagccaaactccagcatcccacaccgcagctgacccactgctcatcgcgagggcctgccaggagctggcctcccgcactacttgtgagtaaagtgaatatcaaataccaatcttagagtacaactgtaccagcagtaagtatatctaggactgtaactgacaaaaataaactaattctgaaaagaagatagtaagtattaaggtttttgtttactgtctatataattaatagaaaccagctattttttctccattaaaacatgcatcacgtttaaagcactatggaatcctccaacctcagctctagtctaacaaactgcagtgttcagagaagataaaatgcccgtgattggtagagtctgcagtccagttgcaagcacctgaaatctagagagagaaagacctataacctgtatgagacttccccttccaaagctgtattgtctacattaaaaaaaacaaaaacagtaacaacaacaaacacacaaatggtcagaaatgtcatccttaaaccctttgtttttcagcagtttgccctcagagttctggcataacacataaagttgtcaggcaactttagtcctcctccaatagtgcaaatcagacacgacagttctcttcaagtatacacacgcacacacatggaccgaaccaaacacgccgtggaagctgagccacacacaccccggtctcaagaagcaaaggaaaaagcacaaagcgtctgagtcaccaattcatcatggcttgtgactgagaaagcgctgtggagtcctggccccgtcggggcagcagacctgcatcagaggtttctttggtaactgaggcaggaagtaaggatgctacattagacagatgttccacgcgtagttcctgctatcatgtttgagggcccccttgtacggataccaagcaagtacaaaaacagaacacaaatcccaacaacatggtttttgcaaataaaccatcccttcccttccccccaccccacccccatgatttttttttttttaagtactgactgttcaaagctcaggcaaaccatgcagatccacgtgttgttggaggaggcgctcccttcaggagaccacagagggggagtgactgtggctgaccatgtgggcagaggggctggcgggctggcccctgcgagaggcggactcagggctgctggatgctccgtccttggccgctttgatctggagccacgtgtcacccagagctttggcaaagtggtcgtccacggagcccgtgatggacacggagttgggtgccggctcgggctccttgtaattcttgcccaggctcctgcggaaatgctcctccaccacggggtcacaggtggtggcagctgcaggcaagcaggaaggcaggcagtcagacacaggtggctgcagacagacaggcacggttgcagcaccctccctcaggcagcccagagccggactggctgccacggtcagcgtgggctctgcagacagaacccacctcccccggctaagtcaggcacttgggcaggtcacttttctgtaaaatggtgatgtaccaactgcactgggccagagtccgagttcagaaagagaatgtggcattaaatttaaataacagtagccgctgccctccctgcaactagggcatgagaccctggaactgagcgaggcggtgtgtttctcatgcccttcccacccaagtcatgcgcaacgctaggcgcacactggacgtgctcaagaaatactttttcaacctcagcaatagatgggctcaggggcgagaggtttcagccaacagcatgacagagaagggctctgctgccactagcacagctgtgacaggtgaggaggcccgggacactcaccgctcggtggcctccggtagctggcaggcccgggcgcggcacagccgctgtgcgcgatggggcagtgcgagaggttgcagttgcgggcgccagccgaggcacaggtgatcacggagggccggttctgcggggaggaggggtgtcagtatgtggagaccagcttcagtaccgggcaccacccctggggccctccccagcacccttcaggctctgtcctggtgcccttcctgacccagtctgccacctcccacttcaatactggagtcctgttgctaaacacagccaatccacagagtgagcgcagctccaagggtgtgtgtagtggcccttggtcgtggctgtttggatcagtgagggtacaaaggacaaaagctcaactgttgagttggtctgtccccatctctcaaatctgttaagacaaacaccgggcatcctgtggaggacagagggttgcaggagggacctcgattctcccgttaacgtccccagagcccttcccatcatgtccactgagccgcgggtgtgcctggagccatccaggacacttcaatacacggcaattaactggaagcattttgcttgagccaaagccagctcgagttggcctcagtgatgacctacaaatcgggacagagaggaaatggaggaaatatgcctaagtgtggaacggcacacatcccaccccagcccgatctgccctgtgcacagcctcactctctccttcacccccacccccacgctgtctgcctggcaaactccccttgttccttcaagccctgttcagatctctctctgaagcctttcactggccaccgccccaccaccaccgcttttcactcctgctcccctaacccaccaagattcagcaagtgcatcggtctgtccaggtgctcccgtaagaccatgcacaccaggcagtatgtctggccccccagctttggtgtggaacctgggacagaaaatatttgtgaactaaacagaacttcctcaggttcccccaggaaaagtatcttccaatacccccgaggacaaggtggtggagtatgtgggctaagttccaggacagccagcaaggagctggttgaaatcaccccacagggaccaatggtgacagcagtgtcagccagagggacgctgggccttatcctccccagccagccctttccattaaagttagagcagtagctggtataaagacacaaaaggcttgcatgccagaccttctcatgatagacgacagtgattgggaatggtgaaagtggattctaggatgaaaatgtggatccacaaggatgaactgggattgaacacaaggacctgtgcttgggtctaacaagaagcgacacatgccagggtagggggggatgtggcttagcaacagcagaccaaccaagaattcagggtttcttagtggcccgacacttagcagcgggacagagctgcccagggttcgtacggcctccatggtgtgcacaggtggcagcgcagagagaacccgggcaggtggagctgggctgaatgtccacgttctgcctgtggacagggcctcgggtgagagacttcacaatgctgagcagacaggctcggaaagggggttggggaccgacagatgaggcctggagcagatctcacactggctgaccacaggggtcaagcagcagcaagagagcagaataccgagacctggacacgcacagagccaggaggaaggagggccctgcccctgtccagctctcagagatggccaggcccttcctgagcctggctgcacccatgaccttgggctctaggagacccccccccagggtcctcccaataaaactcccttttgtgctcagccggcttgttctttgcagcgagcgtgtcctgacccacgcaaatgtggggaactggggagacatttcgagcacagggagggggaatcaaggaagatgaagaaatgagctcactgtccagcctttatgtcagtctatccaaggcaggaaaggccacttcagaagagactctctaacaagggaccagcagggcaggctggctgactggtatcagaccaccttcagggcatctcctgacctgagctggggcgaattgccttaaccggtcacctgcagatgtgaagatgttcagtgtctgggcatcctctcctcctccccacaacccaggctgcagggtggcccgtgagccctcgtgggactggctccaccacccctcctccccagctggagtcaggcatcttgcccctgcctctgtggttgagtgcaggctgggactcgtccacctagaacgggccccaggcctccagatggtgagcgtttatgggatcccgaggctcccctcccccacacccttattttccagatggggaaaatgaaggccagaaacaccctgttggaagttacgctgcggatttgtggcagggccagtatgagccctgtcactaaccccttcacccgctgtcccacccacctgtgactgtcctcagacagaggctgccccgggggagagggctcccaccacctctcctatctgaaagcaacccccaaggctggctgcgccaaactttttttttttttttttttttttttaaagacaaagtctcactctgtcgtccaggctggagtgcagtgacgcgatcttggctcattgcaagctccgccttccgggttcaagcgattctcctgtcagcctcccgagtagctgggattacaggcacccaccaccacgcctggctaatttttgtacttttagtaaaaacagggtttcaccatgttggccaggctggtctcgaaatcctggcctcaagtgatccgccgcctcaaccccccaaagggctgggattacaggtgtgagccactgtgcccagccctcaatgtgcgaagcttaaccccatcttgcctctcctcactggctgctgcccaaggccaccctcttggtgtttgtctgtcctgagctgctatcacaaacatgaaatggggggacactttctgtagcctccccatacatgcccctctgggaactttcctgtcccagttcccagagatctgagacacattttctgccacacagaggaaggcttccaccgtgcccaccccacagggctgcagcatgcgtcctgcctgcctgtggacacagagctttgctgtcaccccaggaagccccctccccactgccatttccctggctctgagctgcaggatgacacccaacagacttccaggaagagacctcggagctgctggagcacaggcaacgtggctgcttggtgtcctcagcagggcgcccgagcccagctcggattggtgtgcatggcctcagccccgccacgctgccgcaggaaggagccccacgaatggttacgacatgaatgacatgtgctgacagcagccacggcaaggagggcaggactgaccaaccccagccgaaaatgacagctccggtcagggccactgtgcccttcccaggaaaatgggcagcttggggtaccccgtggcccctggctttgtcctcagtccaggccaggatcccataaagatatagctggggggtcgaggttcttcctcctaggaaagctgctcaggagccccaaggcacaaggaggggcccttgccacgtgtgccgtgggcagccaggcccattccaggctggggagagggagacagggtaaagagagtcaggccactctgttcagcagttcagtttttgcaaagcaactgtgaccgaaaaccaactgcaagattctcaagagccctgaagagtcaaggaaataaatcatccaagaacacactaagcccgccaagggcccaccctgaccatgtgggcagagatagcttgtaaggctcacagttatgtcccccaggtcatcaagggccagaggctggatgtgggtgctccgagattacagctgaatcctcccctccatacccgtgtccttcagggactccccaacagcagtggcaatggccagagagccaggttctgcctgcacggttcaggccatggctcatggcagcattacaatgcctgttgagcttcccaaagcagaaaggtccactgcccaccccggggagcagtgagcgggtccctgtgggtcgcactgcgcacacgcctctgttccagcccctgctgctgcccaacagcacaatcctctcttctcatgtccatttccccaattagactgggagctccctgtggccgtgacagtgtccacacacacgtctctggctgcccacagctctgctctgcagagggctgggtaaatggtgagcgctcgtaaaacgttgaaatgaacagcagtgataacttggcctcgggttccatcagacacatcagcgatctctcctccagactaaaactgagcgtgctgagaacaaaaactgcatcttgcttgactggcttctggtaccccctggcacacagcaggggtctgtgccattttgttaaatggatgaatcaaacaaacaggattaccatgtcaggctctgaggcaagatgggcaactgttctcagcttcaccaggattcccaagcaccagaaccacctctcccaactcccagggcctaccccacccacagtttcaacagaccccatcagacacggacaccaggcagtgccacttggagggaagccccggtgaggccacagggacacagaggctcttgcagctgaatgcacagagcccggaggcaccccctcggggcacggcaccatcctctctgtcagtcttagcaaatgctgactactgactaaggacctattaggtcgcagtccctggagattcggagagctcaagcagtaattttgagcctcctcaatgctgctgccttctcccatatatttccccaggaaccccatttttaaaaagatttgtttctaccaagcaagctgtgtttattaagcaatcatttaatttcctattttcctttcatagaaaaaaatccctatgtaccaatcataggcttctgaccagcatgggctcacaaccctgtgaccatcaactgtgcaggaccccagcccaaggcaaagcaacctgacatttcccttcatccgcgtgaccgtctaaaggagaaacgtaggacccccccacccgaggatgactacattcatcctaagagaatcaggcctgccacagaagactgctggaggaaacacctcagtacaccacccctgtactgggagaggaaagagatgaagccccagtgacattcaccttgcccaaggccgtgagtgctaagaggcaaggcccgggcaggtctgggcaggaagtaaaagcagaagaggactcctgttctgctgtcccttgtcccaagtgcacaacagaggcg

SEQ ID NO: 9 - DNA, 33494 bp, Homo sapiens
aagaggcaagaggtagcaacagcgagcgtgccggtcgctagtcgcgggtccccgagtgagcacgccagggagcaggagaccaaacgacgggggtcggagtcagagtcgcagtgggagtccccggaccggagcacgagcctgagcgggagagcgccgctcgcacgcccgtcgccacccgcgtacccggcgcagccagagccaccagcgcagcgctgccatggagcccagcagcaaggtgagtcgcgcgcccgcgggccctcccgccaggaacaaaggcgcagactcctgcccgccttacgccggccagggcctcccccgccgccccgctgcgctgtgcgcccggggcgggccgcgcgcctctccgagcctggctcggtgcgggtcccgagcgcagcgccccgccgggccgctggccgcagtggggatgggcttcggatctagcgggccggagggcgccgcgtgcgtagttggcgccggcactgagcacatggcctccttccgggggcgccgcgccgtccacgcggccctgctggggctggggacacagggcccgggagcggcacgtcgcacacgacctcggcagcagcagcccagcctcggcccctcccggtgcgggggagggggcccgagcgcggcgcccattggctgagcgggccgagcccccggcccggccccggccccggcgcgcggaggagtcaggagccgcccccgctctccgtctgctcccctagcccggacgcccctgtaggtgggcggcctggtgcgaggtgtcccaccggcctcccctactcctcccgccagtcccccgcggtgacgaggccgaggccgaggggagggcacttttctccaggcccgggctcgaacgcgggggttgagatgaacctccggtctcggaggctctcctttgcgaggagtgcaggccccaaagctttggcccagtctcgcggagatgtgttccgcggaggcaggtttaccctcggggccaggcggggagcgcaaccggaggggcgggggatctgggggccaggaaagagccccaggctgaagtctagcgggaagcgcgcacgccacggggttggggaatgagggatggggactctggggaccaacaactccctagataggatttctttttttctgtgtaagtgggcttgtcctgcagggcatctttgtagcgtccgcagagcgatttcttttcaacaaattgtttgtggagcccctcctgtgtgtagggcattgtttctttccacctcctttcctccccctagtctacaatattttcaagtcccctttttcttttgaaacggtccctctttatctattatactttgatttttccatctcgtcagctgggagggcacctggatggcccttgttttcttagctgggacgcgggggtagcactgaattttgaactgcccttcctactggctgtggaggtgtcccgctgagactgagcggggtggcgctgggccgcaccctcggcaggaaaaggccttccgccccacacctgttgaatccataaatccagacgacttggttcacccttcctgggccctcgcttgaggtgagaccccggggaagttcccggggaaggctcccaggatcttaggtgagccgtaagggtgggatataactaaacaaaagttcagtgagaagctcttctagctagtggcaaggaagtccaaatatctcagggctcttgcaggccacttaacttctgggcctcagtttttccatctgaaagagatcacttttgtcacttcctctagggaaggaactatctattcagcatactatgccagacatgggtatttatttgttgagtggataagggaatactacgtggagacagaaaagtggaggagaaaatcagcaggttcttagccaaactactttaagcgtcacggaccttatagccctgctggttactcactagcctggagctcagagaagggaaataagtttgccaaagtcacacagctagtaagtggttgaactggatttgaacccaggcccatcagatttaatttcatttctgtctccactgtctctcttcaccacaacatttcttgaattttgggcagaagggagagagtttgcctatcttcaaaggtggccccttgtgccagctggttctaaatagtgtagcaggtgggtgctcttcatggagtgttctccaagttttccactgtctacctcgtcagtaattaatgttggaacacctctttcacagtggtgtatctgtatttttatttttttatttttatttatttattttttgagacggagtttcgcttttgttgcccaggctggagtgcaatggcgcgatctcaactccctgcaacctctgcctcccgggttcaagcgtttcttctgcctcagcctcccgagtagctggaattacaggcatgtgccaccacacccagctaatgttttttttttttttttttttttttttgtagttttagtagagacggggtttctccatgttggtcaggctggtctcgaactcccgacctcagatgatctgcccgcctcggcctcccaaagtgctgggattacaggcctgggattacaggcgtgagccaccacgcccggctgtatttttaaattcatgcacatgcagtttgatactaacagatgatatgccttcataaaatagaaatttcaaaagacagatagatacaagacagcagttatagtcattttcccctccaaatcttgtgtagatcattccatatacattctggaataaagcccttccctttggagactgctgatttgacctgcaagcacagcctttttgtgcatgatgttagaggcctggggaggtcatatcgcttgcctttcacacaagatctgaaaaccaggtgtgtctggctccaaagccttggttctgctatgttcctctttgtctcctaggaaatgggaactgacttaactaacttccccgtgttccattgtgctcctctgtaactcacagtaatgagcttagctgaataggaagtaggggacagatggaatcaccttgcctacaagccaggggttcgcccacgatctctcctgggcagcacgcaagggtgagccctgccccagatgtctcaccccacccttcgtgaagaacttgtaactagccttgcctatgcccatcactcatcacttttctggccagtctctaccttccagaaaaggaaaaatcagaaatctgcaggctttctcagcccctttgtggtgcagacagcatagttttttgttttttgtctttttttgagacgaggtctcactctgtcacccaggcaagtatcttggcttactgcaacctctacctcccaggctcaagcgattctgtcacctcagcctcttgagtagctggaaccacagacatgcgtcaccgtgcccagctaaatttttgtatttttggtagagacagggtttcgccatgttgcccaggctggtctcgaactcttgagctcaggtgatccgcccacttcagcctcccaaagtgttgggattacaggcgtgagctaccgcacccggccaaacatagatgtttgcatatgtggttttgaatcccagcttagcttagttgcccagttttcatcattacagtgtctaggaattcagaaaagaatgtacgtctctgtccccatagatgctccataaatatttcttgcttccttggactcccatgatgccttacctgggctgtgggtgacttgtacctgggccttggcctttatccaaaagctggcattctggcagtatgagcttttggggagtcaggatgctggcccatgggtattaagtcaggtaaatcattaaagctcccactaacccattcttcctagtaggggcttgttgggaagtgagtaggcatggcacatgggtgagagtgccaggccagggagggtcagctcatgtgagtgccctgcgctgctttgggcttctttgctttgcttttttgccttaggcttcctgcctacctttctgaatttgggtcacccttgggatagtttgaaagggacattcatgtccattaactccaagggtcctcacaactgccctgtgatacaagttacagtgacctcatggtccaataaaaaatgactttgccaagatcacacactgagcctcccaccccaagacatgctgccagcctttccaggatgacattagagggtggaaggaacccagagcaggaggggccttccagccatggcccagccctccatttgacaaatggggaaattgagtccagagaagggaagagatttgtccgagataaggctatcacaaaagatttgaggcgttctatggagctgtgttttgttttgatttttgagacggagtttcgctcttgttgcccaggctggagtgccatgacacaatctcagctcaccacaaccttcgcctcccaggttctagtggttctcctgcctcagcctcccgagtagctgggattacaggcatgtgccaccatgcccggctaatttttttgtatttttttttagtagagatggggtttcttcatgttggtcaagctggtctcgaactccagacctcaggtgatccgcccacctcggcctcccaaagtgctgggattacaggtgtgagccaccgcgcctggcctagctgtgttttttttttaaagatgctttcttctccacatgcctgtctgtgccatcctccacccaccccaaatgagcaggaatccccagacacaggacttgccatgccataggagcctgaaagttggattagacgtaacttgacaactgaaactctactgtgaatggaaacaaaacactagatgttcccactaaactctgaccttgaagaagtggctttccttggagccttggtttccttctcagtaaatagagacttggctacccccagtggatgtggtgagactggccccgtgccctaaattagagaagtggctattttaagtggaaagaccctttgtaaggccagtctgggtgtacaaatgatgtaaacagccccaagatgatccttgtctagtaccgagccatccagggattcgaccctatttgccccggagctgggccagcctcaaatcccccgtaatcagcttgtgacttcaaggagctcagctttgcccagtgcctcctggtcacggggtgtcggcccagagctctgctcaagtaccaagggtacagccatccagctccctgcttccccaagactggcaaagctggggaggcctggaacaaagaggaaagtgtgcagtgttggcttggggcctgcaacctcaccccttcccccacctcactcctgggcataaaggtgataaagccgctcactcagtctgcagtctggtaaccgacgtccccatgatggcggaggctgggaggcctcctgaccagattcatgggctcagagaggctgtgtccaggcctgcaggcccagccctggctaccctaacaagcctccaattgttacctctctccacgggaggggtggactggagcctgaggctctgtcttccagccaccaggcctggcagtagctgatgcataaacattagggttttgcagtaactgagcagggctcccaggccttgaacctgggcagaaagaagacagcatctcctctctttgtgaccacactgacttgcctccctgaggcttctgcaccctggaatgggagagagctcttgccaggcctcagctgatggagcctttggctactgaggcctctgctggacaggaagtctgcctatgtctcctagcccagtttatctccccctgccctggcatttgggagtggggaggaaacggctccatcagaaacagctctaccattggaccttaggccagccacacttcttgttggagcttgtgtcctcagctgtactggggatgagagctagctgtctgggtcagcggcactgaggctccaggggagcatgtggtctgtgcagcaggcttggggagtgctgagcagcacagattgggtttcatagcacagtgggagcccagacaggccagctagccataagcacctctgctggaggaagaggtggactctcttgggctggagggcccagttcaaggaaagaaacaaacagctacactgggctccttgatcacccagctgtggcagttcttcttgaggacttcctgcccctaggtgggggctgccttcagctccctgctgcgtgtgataacttgggtgtggccctcacagctgtgcagaagctattcccagagggttctggccccaggtaaacagattctgctctgggctcgccttgcctccatcccacagccctgtgtgctgtctgtggcacagcctagagcagcactgcctcgtggccctggcccttatgcggctggagctgatcctgaagtccagtgtcccagcggtcatggctggcatcatcaccatctacaacctggtgatggaagtccttatccccaactcgctgatcgactgcatcagcctctacgggaatctcctccagccaagcgctaggctgagtgtgggcctgagtggcccggcagccagctatgtcatcagcactgtgggggacacagtgctgcctagaagcccgggctatttgtgggcttgatcctgatcctcattttcactgcatggtctcattctctccacaaagtagcctttgagcccaccagccacagaatgtgatataaagatcacccctgcttattccagaatgaacagcctgagacacatatcccttcagtagttggtcttgtgaatgcagtgtcctagtgcaaatgcccatcatctgttgaccccatccttgcccctgcctgccccatgctgtggatatctgggccccctcatcacccatcctggccccctgaccagtgaggatgccccctcccatctagggtactctgcgtctaaggatgaattccagtgtaattttctctcttctgtaggtttatttatggaagattggacctgttcatacatctgtggggcagccctccatctcccagctatataaagtctctaaccacagtgttgcattgtggggttaccatgtggtctgacacttccttgcatgaactaccctcactccagccctggacagtccagggcctagcaggcagtgtgtggggcctaccaggtcctggcatccaagctgtgtccaataaagttcttagatgtgactggaaaaaaaattggattaaaaaaaagcttcagaagttacagagccaactacagagaagcataataaatgaaagagtgtcttctagttttgacagtttggtgtttaccctaaagacttctctttgtgcatgtgtagatacatgcctataaatagaatatttgtgtagttggatcccactttctgcatagttctttgcaacccattctgttcaccaaaccaacccttagaggtaaatactggcagtgtttctctctgcacatacaaccaagtgccactatacaagttcactaactccctgttccttacacaatatgtacatcctattgctttttttcccccctgaacaatctaccctggtactcttcataacacatacatgttatgtgaaacacagatgtgtttcattctttccaatagctgcataatacttcattacaggcatgtcccaccatgattaagaaatagcagccccatcaccttcttcataccactcaccacctgatgtattacatgtatttattttctgccccagccttcaactaacctatcaagttccataggcagggatttggtatagttttatcgctgaatttccattgactagaagagtgttgggagcatgcattcaggcataatctttccttagcaatatcatttattcatagaagatcctctcttatggagaattaactgaagcttagaggaagagacttttttttgagacggagtttcactcttgttgcccaagctggagtgcaatggcgcgatctcggctcactgcaacctctgcctcccgggttcaagtgattctcctgcctcagcctcccgagtagttgggattacaggcgcgcgccccccacgcccagctaatttttcgtatttttagtagagacggggtttcaccatgttggtcaggctggtcttgaactcctgacctcaggtgatccgcccacctcagcctcccaaagtgctggaattacaggcgtgagccaccatgcccagccaggaaaggacttttttaaggtcacacaagtggaggagctgggacttaaatgtgtctgctgagagtgacagtgaactttgcatgtgcccaatcttaccaaattaatgttctcttagttgaattattgcccatctcaccaccaaatgtgtatcttctcaggggtgtcagtttccccagggtccagatcctggccccacacccacacatggccaaggagccatttacatttaacattccataataggatgcataccttttcggttatttagggaggatgtggttttgcctggaaggctttgagaatgctgggcagctagctcaggggacgtggggcttaaagcagaggccgatcaacttttttctaaagggccagatagagcgtaaatattgtcagctttgttggacatgtagttctcggcctgccactcagctttgctgttgcagtacaaaagcagctgtagacaaatgagtgtggctgtgttccaataaaactttattcatggtcactgaaatgtgaatttaatataattcttacatatcacaaaatattagtcattgtcttttttttctccccagctacttaaaaatgtaaaactcattcttagctgccatagtttgccaactttggcttatagcaaatgcagcaaagtggcccaaaggtttctgagcctgtgcccgggctgtctcagctcagagtgggcaaggctcagagagttgcttttatggaatttgacctacatagaaagcaccaggtagaaaccttgtttccttcagggaccagtacccggaaacaagggggaggacctaagcaggaaagccatagaatttggcatcagagacccccaattggaaacttccctgaagcctagagtcccctggttctgcgcttttccctctctctcatttctcatctgtgaaaagggagtaatcgctccccaaaagcttgttcatggtggttaatcagaatgtgtgagcagcctctggcagggtgcctcagctcgctgctgctgctgctgctaaatgcaccagccccctcctctcagttctactttgaagactggcgagtgccttctgcctcgagggcaaccaggggtgtctggaggttcagtcatgcaagggtcttgatatcattggaaggcttaaaggaagtggcttcaggagcacttaatgcttgaggtcaccctaaggtcaggttttggactgttagtccatcactcttcttttttaaaaggcttggcaggatggaaccggtcagagggtagaatgccaggctaggaaaccaaacaactctagtcccaaccctggcttttgtttgtatgctaggctgggcacctgccctctgacctcaggtgcctcctgtcaagtgccgatgttacagcagtctgcaatttcttgagcttctttctttcttattgcagccaaagctgtcttatttttttttcttttgagagtgtctcactctgtcgcccagactggaatgcagtcgtgcaatatctgctcactacaacctccgcctcccaggttaaagtgattctattctcctgcctcagcctcccaagtagctgggattataggcatgtgccaccacaccccactaatttttgtactttttttttttttttttgagacagagtcttgctctgtcgcccaggctggagtgcagtggcgcgatctcagctcactgcaagctctgcctcctgggttcaagccattctcctgcctcagcctcccgagtagctgggactacaggcatgcgccaccatgccgggctaattttttttttgtatttttagtagaaacggggtttcaccgtgttagccaggatggtctcgatctcctgacctcgtgatctgcccgccttgcctcccaaagtgctgggattacaggggtgagccaccgtgcccggctccaacttttctatttttagtagagacagggttttgctgtgttggccaagctggtctggaactcctggccttaaccaatccgcccgcctcggcctaccagagtgctgggattataggtgtaagccaccgcgcccagccttgaggttctttcttttaatgcccagaagttcatttaaatgagtaagaaacacaacaaaacaaattaaaagggagctgtcatggattcaggtaaacccctcccccactcctttgagccgtggactaagcagttggaaagccctgcgtcccctgcttccctgcacctggggaacccatgtgggatgctgtgggaagaggacaagatggagcaacatctggagtctgccagccctgggaccctcctcttgccaggaataccctgcctctgagtagcagtagccacgtgcccttcctgtgccaatatagattgagaacctgctgcaggccaaccctggggctggagcgcaatgctgacacactgacatgggtcaaaaggccacagtgtttggcaagttatacaatgtggccagggccatctggcatccgagcgttgggggagaggtcctgaatcttaacacctcatccatggcttcctgggagagggagggctcttgtgggtcgtgagacccccagcggtgggatagggagggtgaggggtggggacatgagaaatgcttctctgtgctggaccctgagcccagttgctggccaagctgggaggccatgactctcctaggagagtcaggatttgaactcagtctgcctgacttcagaggtccttccttgacagccctgtgggcttggagtggagggttttgtggggtgctgtatttacctctcagagctctgatgttccagcactcgtcaggggtttgataaatggctaaggatgaacactggtctggcacaacagatactcacagagccagctttgcccaaaagccaaattgaaaagtggcaggtttctttgtttggcaattagcatgtgctgttccctactctcgtcactctggctgcagacacggtatgacccaggttccattccttttttttatctcactctgttgccgaggctggagtgaagtggcatgatcttggctcactgcaacttctgcctcccaggctcaggtgatacagatgtgtgccaccatatccagctgtttttttttttttttttttttttttgtgtgtgtgtgtgtgtaattttagtagagacctggtttcaccatattgcccaggcaggtcttgaactcctgagctcaaatgatccgcccaccttggcctcccaaagttctgggatcaccgcgtcctgcccctggttctattcttaaggagttcccaaactgagtggcagatgggtaataagctagagactgcagaggacatagcaagagcaaaggcctggaagagaatggaatgttctagaaagtagtctcatccccagggagtgctgatgggctgctggggatcccagactctgggctgtacattgctccccaccagtaaaaaaggctcccacaagaaaatcacaagctctatggggctagtacccttctctaagtcatcaccaactgttcatcagcttgacaccagaataaataaatacacgttgagtgaatggacttcattgccatgttccagttctagccactggctggtgggggcagatggtgctgaggctgcccgatcgagggtagcttgctattcttcaccgatccagcaaacacttgtggagggaattctgccaggcttcatgatggatactgatagaaaacgtaacagcaaccctttaaggaaggaactttcatccccgttttctaggtgaggaaaccaaggcccagagcagggctgccttgtatccaactccaaggtgaaaggaggcagcttgctgcatttaaacgtgggtctgcttccaagcccagcaatgatcaagccggctatagtgggcgcagcagagtggcagcatgaatctgagattggtcgcagtgtcttgtgcctactgaggagcaggggccatgtccctccccctacacctagcactgagccacactgagcacgctgtttcttaatctgactggtccccatttcttctccttgcacatactgttctgtccacctggaatgtagccttgccactgctttcccacttggcagactctctgtgtgtccttcacagcccagctccaatgtcacctcctgggaactcatctttttttgtacccaggcaaaactggaaatctttccctccagggttctcacagtgcctcataccagccccctgttgaagcccagaccacactagcctctcatcttcatctgcctccccactgcccccaccccactgtactggaaactccttccttggtgtcaggactgggtccagtttcatccggggccccagctctacttagcatgagacctagagcatgggtcactggtattttagtcagtcctagtgcagcagctgcctgggtggatgtggatatgacccagggagtgggtaggcaggttttctaaagtcgagtttgacctcgacctgctgatgacaaggtccagcggaggggtatgtccttggcctccagcagcccccattgacagaggctacagtcgagcagctgctcagtggggccccagggatgacttcagaggctccagacccctggaacatcagatgcagacctcagtaaaacagggcctgtgataatagcacttacctcacatagccagtgtcattcactcatgctctaccaacataatttttgccagatccatggatcatttgtattattttccacttaatgtttttatttaaattgctttgttctaagtaatatgaaatcacagggcttgtaaaaattattttgaataggtgattccattcacaccattcagaattcaaaaaagtgccaaaggctataaaatgaaatctccctttcaccctgtccccagtcacccaggcccccccggggttagaatgttacctttcttgtacattcttgttttttgttttttgtttttttttttttttgagacagagtctgctctgtcgcccaggctggagtgcagtggcgccatctcggctcacttcatctcccagataaagtgattcttgtccctcagcctcccaagtagttgggactacaggcacgcaccaccatgcccagctaatttttgtatttttagtagagacagggttttgccatgttggccaggctggtctcgaactcctggcctcaagctgagattatagatgtgagccaccgtgcctagcctcttgtgcattcttttaaatagatgtgtatattctccccctacccccagccaatttttttttttaacccaaaaggtagcatacaatatacacactgctctgtttttggtttcgcttttgttttttgggacagagtctcactctgtcacccaggctggagtgccatggggtgatcacagctcactgcggcctcgaactcccaggttatgtattccattatatcactatgccacgttttcttaaatgatagattgatgtcactgcattgcttgttttttaatctattctaatgtgttccagaaaaatacagtatatactttgcatcccatgagcaaatgcaggtaataccgcaggcagaaagcccagcacgtggcgggcctagcagtcgctgtttagtgagccctcctggtgatgcttagtgccttgccacagcctctgaattagtgtccaccctatgaattaggcttgacctggtgtgtcgctggggtcccccagaaatttgtcagctgctcactacccactcggaacaacagctctgggcctgaaggctccccagagaattgagagaagggagattctgggggcagtgccaggacatacggggggtgggggctgtctttctagttgggcaatgcagaggatttagagggaatggagtccctgtggtatgagggaagccccagcatgtggaataaatgtccagaggcaggctaaggggtcaggtagacagactaatgggaaggaaggatgcagcgcacacacagagggggctctgagctgcacactcctcctgggccgaagccttcttcctctttcgcagcctctgatgtgagagccttggcttttgcagtcgttgccctgactgacgctttcagagaatgaaaagaccatactgggaatatgcctggtaacagctatgcccagggctatctgtgatgatcttgaagtaaaggctgcttctgggttctgtggaaaccaaggcccagagacccacagccaggccatggccagctccacccacttccagggcccagcttggtatagtgtgcgtagtgaatgccagtcgtttctttggcatgcctcccgcagccctgttctcccacaatcagttaaaggcctgcctaatgtcacatttcctgacttcctcatttttatagctgaaaagagcacttttcttcagcagggctgacaccctgctggcctctcagtcacctgtggctaagcagggctcttcacctgctggcctctgcccttcctgctgccttaggtcctcggcttccaatggacagaagcaaactgctctttttctctcccatccctttgcccattggaaacaccttagccccacactcttactcaccttgtgcacttttccaaagtgcattcccgcctagcatgtcgtctatgtccatataaccttgggaggcttatggtttggggattattgccgtgaggagcactgggtaaggagtccggagccctgagctctgctgcaggctcctgagtgatctggaacttgcctcaccctctcagggctcagtttcctgccctgtgaacagcaggaagggtagggcaaggtgggatcacatctccaatgtgacaaacgaagctgttgccattttgctgacaagcaaatggaggataggggagaggtggtacatgggggacttagcctgctggaattcacagagcaaacaggcagatgggctggaatcagaagccagcggcttcagctccaaatccagggtgcttctcctatctatatctgtgctattcctaccaagtaatttgggccccctcgcataggagggctggttcctgggcctcccagtcagagagtctagaaccaccagaccctaggcatggctccaccagggaaatgagacccccaagaatccaaagcctctccctctctgagacctggctacagagagagaagatcatacttcccctctctccccaggaaatggcccggccagcccagtatcttgaagtcagctaggctggtttgggcacctaaggtcaggaattggccaagtttcctgggagaaagactggtgtggtgccaagagtcaggcaagatatctgaacacagaaacttgccagtccaggccctgccctgtagtaacctgctcccagacacgcctataacagtgtggtttgtttctccgcagaagctgacgggtcgcctcatgctggccgtgggaggagcagtgcttggctccctgcagtttggctacaacactggagtcatcaatgccccccagaaggtgagtactgtgccatcgttggcttatggacaccagcctgctctgttgcacatcacacatgcccacagtctcacgccaccacctgaattagagtcatttatatgaacgcactgtactgtctgcctctccagccagttttctggccctgatcatgtcagagactcttctcttgctttggaatcagggtggcagaattctagaatctcaggtcccacagaatcctggggtcttgtataggccctcttgaccaaccccccacccaactcagtcatttaataatatgtttgatgatataataaactcaaagcaaagctcaatacaataatgctgcatttccgtggcattctggggctgcagagggttttcatgggcttgtctcacttgatgctcactgcagcactgtcaggaggcagcaggcaccactcccagcctgcaggtgtgggaaacggccagagagaggaaacccgcccaatatcacccagctaagtcagagacagagctggtatccaacacctgcctgccaggtggtccttgagcctgcactcatacccatccacaggcagcacacttcctttatttgtaggttgaaaccgcgtcctctccctgaaggccctgtggcagtcaaagcagaaatggcgtcttgccctagggagccacagggggtgaaggtctgtgctggcttcctcctccctgccgtgcatcctagatctgtcctcacttgtttacttgaatgtcaggatgggaagggacctagaccatctcctccagcccagcctacttgcattaaggaggagagaagaggaaaagggggtagggggtaggaggcagggacaggaaaggaaactgagcccttcctctgtaccaggcattttgcttgtgtttatgagattgggtggtgatttccattttgtagacccggaaactgaggcccaggcagatgaaatggccgacaggcccaaggtcacaaagctattgaatgctggagtcagaagccaagctctgttgtttccatggcctcaggttgtcttcctaaccagctgccttgcccgtttaaaaatctgtaccttcccagagaggaccaaatgagagtgggcagtcctcacgtcaggaccacatttcttgtccagacggatggggctagaaagtgagtgcagtgactcccaaagatcagggtcctgtttgggggaaccaggtagtgtctagagttagctgggcttcttccaaataggcagacagtggctatggggccacgcccgatgctgaggagcaagtcaccaggaaggcttggcctgctgagtcatgctcagctgcaggggaggtgacaggacttttccaagtttgctgggcatggagaccgtgggcccatgcttggaccagccccaagccctgcatttgctaagtgctcttgacagctcttgccaaagtgtgtgcttcagaactggctccctttgggaatccttacagatggaaagtctgtaagacaggctgggaggaaacagagggaggttgagctctccacttggttgcacattggggtttccagaacgcccccagattctgatttaattggtctgggatgctgtttgggcattcaattaaaagcttcccaaccaattcgaatgtgcagccaaggttgacagctactggatttaatgatgtcttgactgtgatctcatagtgagttaatgacagaactaggactctaaggccaggacagaggaggtgttttccagaaacagaacagggttggggtgagcagggggccttcaaagcaaaatgcccagaagacagaaagcctggcattcagtaaagcgtgagtagtttagtgtgtcactagagtgaacaggaggaggggaaaggttggggaggtcaacaaggtaaggtaggcaagagccagaccacaaagggccttgtgagtatggcacggcacagtcagaaggggcggatgggcaccagcacgggggcccagctagggagcatggacttcaggatgaggacaatagggacccactgcccagggcagacgtgatcagacttgcattgtagggaaatgactcaggcgtctggtatggaggggcggacttaagaatgtgagactagagacgggaaaccatcaagaaagttgccgttggactagtgacataaaagcaaaccctcagaggaagaatggacaggatttggtcatcaattccgtgcgagggcaacagagaagggtttaaaaatggtttctaggtttctggcatgggtgatgtgtggtttgaagaaggagcaggtgtgccaggagctgagaggtggccgtgggatgtgcaggaatggaggcgtggggtgacacagctggagatgtgcaggaggcacctgtatgtatgggtctgtttcttagacccaggctggagaaaagttgagaattagtcactggtatccacacagtggagaaagatcttctagggagactgtggaataaaaagagaaatgaagattaaggccgggcatgtggctcacgctgtaatcccagcactttgggaggctgaggtgggtggatcacttgagcccaggagttcaagaccagcctgagcaacacatcaagacctcatctcaattttataattaaataaataaaaattaaaagtaaaagatcaaggccccagagaacaacccattgctagaaaaagaccctaagtagaagaacaagagctggtatctctaaaaccaggagaggataccctcccaagacagagggataatgtaagccatcgaagggccagggtatttgtctggtttgtccacggccgtgtccttagtgcctagaacggtgcctgtcatagtaatagacactggtggatagtgagtggaggaaggccatcgggtaccccaggggttgaactgggcaagcctctccacattgctgaatgcagaagaggcgatggtggccttgtggccactcgggctgactgggtggcacagcgtggatagaagcctcactacgattgggtgaagagtgagaggcagatgagaaagggtggagacggctcttccaaaagagttggtgggagagggagaaaagaggaggtttggaatgatggtatggctaggaatttatttatttattttaatgaaggttatttttaaacatgttggaaggaatcagcaggagagggtgaagataaggaagtgagggcggaggtcttccaggagggagggtggtgtcggagcagaagggaggggctgcctttggccaggagggactgagatacctttttttttttttttttttttgagacggagtcttgctctgctgcccaggccagagtacagtggcatgatcttggctcactgcaacctccgcttcctgggttcaagtggttctcgtgcctcagctttccaagtagctgggctactggtacaggtgtgtaccaccacgcccagctaatttttgtgtttttagtagagatggggtttcaccaggttggtgaggctggtctcaaactcctgacctcaggcgatccacctgccttggcctcccaaagtgctgggattacaggtatgagccaccatgcccagccagggactgagagacttctgaagatgtagacaaatctgagatgaacttctgtgatccccggggcctcccatctaatcagaaataggcaagaggttataactgtcatggaatatgggcagaacctctgaccagggcatcacggggctggtcagcagcacagagggcccagatgagcctgtaaactgcattcataggaccatgtatggtcacctgtccaaaggtcacttcaggaaccagccccagcagaccgaagctggagatgtgagtggccagaactgagaacgctgaaatctagcggtgtttcttgggcaagcacccagacacttggtctgttgacttttgtactttacaaacacttctcacaaggctggctgtagtttttccaaccaggagccagattagaagtgatacatgtaacatgtgaagagaggacagaaggacccaagaagaagaaatgaaagtgaggctcagagcccatgtgtagtaacagggcagagagactcctgtgcccgcgtaggctgaaggcctgccctagggcgacacagagattccatctggccaaccctttcattcagccaggacttcctgagcatccacgctgtgccagatgcggtcctagacagtaaggagagagaagtatagctgtgaacacagcaggcacatgctggccctcagggagctgcctgagacacagtctgagccaggccctgtctccacagcagtgggagagaccccttggagaaagccagagtgtcactaacagagggcttcaaggtgctgtgagagcaaacggggcaactaatgctggggctggggtgacaggggagattaaaaaaagggcttcacgaaggacttggcagccatgctcgaccttgaagggttagttgacctcatagggcaggaggggcaggtgtctgggcagtgagaggggcttctgcagaggtgcaggggtgtgaaatgttctgctgatgcggaattgctaactgcctgcagtgggcacactgacttcccttgtctgtttagaagaacctctcttaggaaacagcattgggttggccacagtttgcctactcttgagaagagactttgccccacaagtggtgaggatgccagaagcttgttctcttccataaaacaggccccaaagggcttcctcctggaagtggttaattaatcatactaccttatatgtttacaaagcaccaccccataaattaccacctcacagcaactctacaaggcaggcggggctgacatcttcccctcttctaaatgagggaactgaagccagatgaggtatctggagagtgagaggctgagctagaggtgggctccaggccttgtgcctccccagctctgcacactgcccctgccctgctgtgagtgtgacaggacattcctgccatgcatcccctcctggaggaggaggacagagcagaagaggtgagcccagccacagagggagcagctaaatgaaccagggaatcctgaccatcatactgggctcatccgagcactgcctttcccctccccaaatgactgagctgccagtagagatgactgacggccactgagaaaccatgaagtcctggcccaagggacagtgtcaggcatgtctgagaataaggcatcctcagaatccagagtttgggccagaaaggcctcagttgtttgacaaacaacactccttgtttgacaaaggaggaacctggtctgcagaggaggtgaggtctgcccaggatgacccagcttggtgagtgaaagagctggaggcaacacccgcctcccaacccaagccctgtgtcccgtcaggctgaactgggcttcgtgctctaggcagcctctccttctctctcctatatccaaagagttctagtcctctctccccttcacccgtcaccactaccataaacccttactgcttacttatagcttgcccaggcattgttatacatactctagaaatagtaattcagttgttcttcaaaataaccccattaggcagacaccataattttccctgctctataagaaactggggcacaggaatgttaagcaattaaagcaaggacacacagctagtaagtggcaaggctgcaatgtaactccggggagtctggccctagtctgtgcccttgaccattgtggaagatggacacagtcccagatgggcacctaaacaccctttcactcacctacaactgccacctagctggcagtgtgtggtctcactttggagctgagtcaagctcagtcatgtaccaacatctcaggtttcccacacacagttgcacaatctcttacaccatcacaccctgtcatatcacatcacccctcaagcccttcagttagattcatggcttgttggtcatttagtgtcaactctgcacctccaccaccgtgctgggcaccagcaacatggatgcatcagacagaccatctccgtgctgaggtttactgtacagggagcacacggtaccttacagttagtcttctaaaggcgatgatggaaatgcgagcaagcacagtgggagcagggaaggaagagggagagggtgcttcgcccttagagcagggtttctcagcttggcactgtgatgtttctgctggtgttgtagaggcctgtcccatgcattggaggatgtttatcagcatccttggcttctgccctctagataccagtagccagtgtggcaaccaaaaatgtctctgggcattggcagatgtcctatggggtaccaaagccgtctctgtttgagaaccagttgcagtggagtgggaggggtggttctcgggaggaaggctttccagaggagtatctgtgcatgttctgaaaggtgattaggcccaagcaaaggtgtgaggtgtctaggtcgtatgagggagtcactgcgtgtgccttgtgagtcatagttggggtagaggagacactttattgcaagagctgagaagggcttcgggtgtggccacggcagtgggatgattcctctgtctaccgggaggcctggcctggcctggccttggtttggaggctagccatgtcagggctgttccagggaagcagcctgggtggtccagccctctgcaggggggttggggcccagctctagccccaacctgggcctcttcccccaggccccaaagtgaggccccaggggacccagtgggcagggttatctgtccagccccacctggaacatctggctccaatctcccagctcaccctggggtgtggctgagagttgctgtggagatgaaggccctgggctgagagcttgtgggaagggcagtgtggggccagccccaactggaagacaggggcaggcaaggaacaggggtgaaggccaggctgagaggctaagccggagaagctggccctttcctccttgtaactggcgctgaaagcttggctggcagtttagccccttcttccccacaatagcatcccgtagagcacagggagagttgagaccgagcctaaacctggcccagggatccctgctggggatgacctaactgacctagtcctcctggggtaaaggaatgtctagagggaaggatggtgagaccagccagaggttccaaaacgcatacccctcctggcagtggtctagaatcctagatcaagggttggcaggagggccacatccagccagcagcctgtttttgtgcaacccatgagctaacaatggtttttacatttttacaaggttgagaaaaaaagaacaatgagtgacagaggccatatgtggctcacagaccctacctaatggattctagctagccttttacataaaatgtttaccccagtccggctctggagcactttgacttgcatgctccctacttacagggaactcaccacctgtaaggtgggcagcctcataccctgaagtctataaagctcttccttcccctgagctggagtctggccctggcacctctgccctctggggctacagagtgctgggttcctctgccaggagcagccgagcagggtctggagactagctttattccctgaggcaggcccgtagttccttcaggttcctccttactcttacattcttagggtaatgatttctggcaatttcaaaatggaaaaccttgtccctaaggctcctccgaaagtggtgacttcttttcttgagagagcaacagtgacagcagtaacagcttacccatgtgccaggcagtgttcgccgcctcatgcccctctacaaaggggaagtgagaagttccttggcagatgggcagacatgtagtctcacccacagttgcctcgactggcgggaggtggtgtggggattcccaggtgtccttaggcttgggcaggcctccccctcaccccaggagagccaccgggtgaggaatagcttcgcgtaccagaagccatccggttcaaaggatctcagctgcccagagtcaacctgcttctccagggtggtctccatggtgggtgtcctctaggctcagtgaggcacctggacagagatctgtagtagcccctcagctctaggctggccgacaccatggcagtccccccaggaactaaccagaaccgctcctccctcctcaacacgcttgccgccacccagactccacagctgggtgaagagactgggctgggaagggagcagagaagcgggtggatggccgagcctggcacatttggtgtgcaggactccgactgcattctgaggggtggttcactgtgggaaatggggtctgactttggtggataggaagagtcgggagcagaatccagatgagacccagggcaggctgcctgggtagagaagtaggacagactcggaggcagaatcgagaggacctggtgatggatggatgtggggtggtggcagcatcaagtgtttaaatcctaagcttgggacgggcatgtgaggtgggagcgttcagaacaggcacgtgccaggtctcacctcacacatgacccagggttgcggaggctgctgggagccggcgggattgggcctgtgggatcctgtcagggcataataagtagactcttctttcctgaggtgcacccagacacttctagggaggatgtgaccccagagcttttccccatgtagggttcttctcattctccagcatccccctgcctttcctgggccaagagtcagcgtggaaccccatacgaatccccagggaggagagggcacagagcaccggaaccagcagtaggaattggaaaaccaggcgtggcttcttcccagaaatctcaggcatcaagaggcagaaacccactccccagcctcagcttggccaggaagtgctgctgtgggctggagaggatgggtctaggccaaggtgaacatgcagagagctggctgctcacccttcctccaccccataaagtggtctgagtaacagagcagctaggcagcgtccaggagccagccctggacaaggttgggtccctttgactgtgtgaccacaggcaggagacgtaactcagggtggagctctggtcacacctcacttacacacagccctcttgtcagttgccccaacatctcaagagatcttcaagcttatttaggtagtttcaagccttacttagcacctatttactctttctttgtatacaattcaaacaaattccatttgctgacttcttggcaaatttcaaaagaggtgtggagagttgtacaagacaagcctctgaaccacagagggttgggggaataccttagaactatggaatgcagaaatttagccatcaggagccagtctgcacagggacaaacacctctccttgcccctggagagagccccaagggcagacaccattgccctgcagccctgcttgtaggtctggttgctcaggagagcaaagtgaaatctcttcacattttcaccccataatgggtcaggaaagattggaccctcagaagggcaagcgccatttatctggaccgttcccatatccaccctcattcagagcagcctgttcttggtggagcctgataaacggggcattaccgttcccaaccagtcctcctctggggttagtttcgtccacagaagaacactttgcattttgttactctgttttttgtcaaaatctgccttctgtctgcccccagcagaatcaaggggttctaagaggagagcctaacacctttggttcgattcctccatttcctcaccaggtatccctggcactggctctgggacagaccatggtgtgaatcaactgtcttcctcagggaagacaaactcctggagtcagggaaacctggatctcgaaaggtttcagcaataaggccaggggtaccttccaggcaggagtagtagcatctcaaaggcgtagaggggtgggagatggtgtgtagtgagtgcaaaggtgtggtaggtagggagattggattgatacctggcaggagccccgattttgagttacgggttgaaggcttggggagactctgttagtggtctgcacagccttcaggccaccagtgtgcagtggggtgattttagggatgatgacaccaagcactgtttcactgattccctgcagcactgtgaagcagctcctgctaatgtctgcactttagaaatggggccatggaaactcacagatgaaataacttgctcatggtcacactggaaataaggggtggagctaggacctgaatttagttgtgtccagaatcagagttcaggtttctattcactgccctgcatggcgtccttggaacggacaagcagatccttagggcttgcctctgccctaccaactgtcctcgccccttggagcctggcctccatcagatgcctgctgacttgggacaggttgtgacagggcaggggaaaagatggctagaggctgagcacccacagcaatgggaaggaaggcaccaggaggcaggcccagcatatttgaataggtgggcatttctgggactgcaggctttggtttggcaagtgtgcctgcccacaccttcttcttctgctagacctcagtgggttggaagggatagggaggaccaacagcagtgatggaggctgcagaggctgcataccgctgtgtgtgcatgaacctgtggcatgcacacacacggaggggtgttgggatgggttgggttcacatggaattgagtttgagctgtaagtggtaggggatgaggggcatgtgagtttgtgactggctaaagcaggaatatttagattctatgagcacgggtatgtgtgtgtgatggtatacgtgcataagaagccgtttctgggtaactagggcctgcactctgctatacgtgtggctgggtgggtctggccagtcccatggcactgagagtgtggtgagtgtgctcaggcagaacgggtgctgcctgcctaccacatccgtgggagctggccagggtgggggcagggctggtgggcagggctgccctaggacgggcgtttccagttcctggaactgcttccttgtgtggaacctttccccatacctcctagctgggcccttgggagaggggaggaggccgtgggtccttcaagggggtgctcgcaggccagacacaagggagctaggcctggggaacagaaagccacagcgtgagtctttcaagcacttctgaagggtgacatgtgtgagtttgtcacaccaggccctcagtgcggtcagggagtctgtacttcctggatggcggaacctgtctgtcaagccctgcttcctccccagcaaggggttggggggagggcctgatggcaggagatgggcccctggggctttgagacatggtgaggagaaaaggggcaagtgggaagacccttttccttctgtatttctctttttttttttttttttttgagacatagagtctcactctgtcactcaggctgaagtgcagtggcacagtcttggctcactgcaaactccgtgtcctgggtttaagcaattctgccttagcctcccgtgtagctgggattacatgcttgcgccaccacgtccagctaattttttttttatttttagtagagatagggtttcaccatgttggtctggctggtctcgaactcctgatctccagtgatctgcttgccttgatctcccaaagtgctgggattacaggcgtgagccaccacacctggtcttgtacctctctgttctatgcctgaacttccaccactgatcacttgccatcatcccagcaagtcacactgagcctgtgaaaccacagggcactggaaaccacacgttaggggaagtgggagagttggcggggctctcagatgaactccaaccccttgtttctcgcctggggaaagtgaggcccacaaaaatagagggacttggctcaagaacatgcagtgaatctgtggcagagccaggccctggccctctcttagggaggggtgcaaggggaaaggaaaaggaagactgggtcctggcccctggcttgctcacccaggctgcatctccccctgcaggtgatcgaggagttctacaaccagacatgggtccaccgctatggggagagcatcctgcccaccacgctcaccacgctctggtccctctcagtggccatcttttctgttgggggcatgattggctccttctctgtgggccttttcgttaaccgctttggccggtaagtaggagaggtcctggcactgcccttggagggcccatgccctcctgcccagggagtcccagatggggtgggaggtaggggagacttatctgcctgttccagggtattacctctgacccagcccctcggagcccaaggaatgtgggcactggcctgacctgtgaccccgtccccaggcggaattcaatgctgatgatgaacctgctggccttcgtgtccgccgtgctcatgggcttctcgaaactgggcaagtcctttgagatgctgatcctgggccgcttcatcatcggtgtgtactgcggcctgaccacaggcttcgtgcccatgtatgtgggtgaagtgtcacccacagcccttcgtggggccctgggcaccctgcaccagctgggcatcgtcgtcggcatcctcatcgcccaggtaagctggggcaggatctacctgcctggcacggcccctgcccacagcttcagtggctctcggatctgtgcccagcagggcagagtttctcttccgcccagcccccacagccttgcagaggacaactatggtacacaggtccagagaacacagcaccatggcctcccagttgacagcaagatgacttgactcttctcagtccctttcttctcactctaggcttccaaccacagggcccgccttcccccaacatgccgcaggctgttatgcacagtaccctctctccaggaggcttccccttccctgtccccaaaaccctcttgtggcagagtagcagcccccattctctgtgctggacacatctgtggccttgtcatttgtcctcccagcaacactgtggggtaggtcctacttttcccatgtgaccgatgaggaaactgagaaacagggctcatgctagtggcagagcctctagaactggggcccttccctgaagcagcagctgacacaaagtagggaaggccactctggcaggacggggtgggaaagggggtcagggcagaggcgctcacggcccctgcttcccccaggtgttcggcctggactccatcatgggcaacaaggacctgtggcccctgctgctgagcatcatcttcatcccggccctgctgcagtgcatcgtgctgcccttctgccccgagagtccccgcttcctgctcatcaaccgcaacgaggagaaccgggccaagagtggtacgggcatggccctgccctcctccccactccctgagccctggccttcttcccactctgagccaccctcaccttccctccggtccccccagtgctaaagaagctgcgcgggacagctgacgtgacccatgacctgcaggagatgaaggaagagagtcggcagatgatgcgggagaagaaggtcaccatcctggagctgttccgctcccccgcctaccgccagcccatcctcatcgctgtggtgctgcagctgtcccagcagctgtctggcatcaacgctgtgagtgcccccacccacccttcctgtgccccagccaagccctctggtcaagtgtgcatggtgaacaagtcccaaacttgaaacaacagatacgcctctgccgaagaagtttccctttagaccccaagcccgtaaggtcactgcagtgcagtgtcccttctgcctgagtatttgtccccttcattctttactcatcctgggtcccacatccactgctacagaggcagggaagggccacaatgtccaggtaggccccaacagtttctcttgtctggcaggtcttctattactccacgagcatcttcgagaaggcgggggtgcagcagcctgtgtatgccaccattggctccggtatcgtcaacacggccttcactgtcgtgtcggtgagtctttgcttactggcccccccagccaaaccccagggaggaggcagtgccatcttccccactggtctttgcagtgccctgtgactttctcagctcttgaggcaaggcctctgggtgggtgggttcagaagggcactaggcaggggtggcactgacactgtctctgcccacagctgtttgtggtggagcgagcaggccggcggaccctgcacctcataggcctcgctggcatggcgggttgtgccatactcatgaccatcgcgctagcactgctggtgagttgctaggttctggagagtgagggatgcgggagagtttgcctgggcttcatatcccaaaatgcctgtctcagccccaggctggcaggccttttggtggctgcattctccctggctgtgggtctgactttctggctcctgaagttgtctccttccaaaccacacacatcctctcttgaacttgctcctccctgcttgatggattctcagcgcagcacctctggtcccagaccccaaactctcacctccttaaggaattgctttgcctaatattaaccctttccaatcttcatctgtagcctcaattcatcttcacagcaaccccgggaagtagtgctgtcctccccatagaggcgcagaaacatgccttgcctcattcagttcacacgactggaggtgtagttcagttcttcccattttatgggggaggaagcttaagtcccagtgaggttagtaacttgtcagataaaggatgaagccaggaatcaacctcagtcccaggcctgtgactgtgaccgctgtgctaaccctgtgcctggcactcacacacaggcactcgtttatttagcctctgggcaaggaaagcaccatgactgtcattttacagctcaacctgggcttggaaagtttggtggttgccgaaaggccagacaggcagcaagtggaaagcccataaattttctaccctggcctcctcaagaatggttatatgcagaaccgtatgcttagcgcttactctgtgccagcctgagctgggcacctcacacgccttagaacctgaatccaccccacccccaggaatgttctgcatcctgccacaggcggactgtgctgcaggcacagacaggggaccatggggcctcttagcaccgtccacatgcacaccacattaccactcccagcgggtggactcaacacttgcagccaccctgcaggacttaaatcattttgttcggatgaggaaacttaggcccaatgctggatacacaacaaatccaggaccatccccaggcttcctgccttctcgcatagctctgctctggcctctgtagcttctgtttcccctgaggatccatcacaacccagtctaacttttccccctctccgtcatcctcaacaggagcagctaccctggatgtcctatctgagcatcgtggccatctttggctttgtggccttctttgaagtgggtcctggccccatcccatggttcatcgtggctgaactcttcagccagggtccacgtccagctgccattgccgttgcaggcttctccaactggacctcaaatttcattgtgggcatgtgcttccagtatgtggaggtgagaacccccactgtctctatactcacccgcacgcatgaccccacagtgctgtgcaaagtgctggcccagcattctcattaggaatcatgctgaggaggaaactgagggtaggaagcccaggtcacatgaccaagaatgctgacctcaactccagggttctccccttagccttgaatggtgctcctggagcctgttacattctaggtacaagcgtggtctcagttaattatgatagcatccctgggtaggtggatgttcccttttcagctcaaaggcccaaaggtaaagtgacttatccaaagtcctacagccaggatgtagggtcatgactccaaccaagtgtgtctgtgtgtctttcagcaactgtgtggtccctacgtcttcatcatcttcactgtgctcctggttctgttcttcatcttcacctacttcaaagttcctgagactaaaggccggaccttcgatgagatcgcttccggcttccggcaggggggagccagccaaagtgacaagacacccgaggagctgttccatcccctgggggctgattcccaagtgtgagtcgccccagatcaccagcccggcctgctcccagcagccctaaggatctctcaggagcacaggcagctggatgagacttccaaacctgacagatgtcagccgagccgggcctggggctcctttctccagccagcaatgatgtccagaagaatattcaggacttaacggctccaggattttaacaaaagcaagactgttgctcaaatctattcagacaagcaacaggttttataatttttttattactgattttgttatttttatatcagcctgagtctcctgtgcccacatcccaggcttcaccctgaatggttccatgcctgagggtggagactaagccctgtcgagacacttgccttcttcacccagctaatctgtagggctggacctatgtcctaaggacacactaatcgaactatgaactacaaagcttctatcccaggaggtggctatggccacccgttctgctggcctggatctccccactctaggggtcaggctccattaggatttgccccttcccatctcttcctacccaaccactcaaattaatctttctttacctgagaccagttgggagcactggagtgcagggaggagaggggaagggccagtctgggctgccgggttctagtctcctttgcactgagggccacactattaccatgagaagagggcctgtgggagcctgcaaactcactgctcaagaagacatggagactcctgccctgttgtgtatagatgcaagatatttatatatatttttggttgtcaatattaaatacagacactaagttatagtatatctggacaagccaacttgtaaatacaccacctcactcctgttacttacctaaacagatataaatggctggtttttagaaacatggttttgaaatgcttgtggattgagggtaggaggtttggatgggagtgagacagaagtaagtggggttgcaaccactgcaacggcttagacttcgactcaggatccagtcccttacacgtacctctcatcagtgtcctcttgctcaaaaatctgtttgatccctgttacccagagaatatatacattctttatcttgacattcaaggcatttctatcacatatttgatagttggtgttcaaaaaaacactagttttgtgccagccgtgatgctcaggcttgaaatgcattattttgaatgtgaagtaaatactgtacctttattggacaggctcaaagaggttatgtgcctgaagtcgcacagtgaataagctaaaacacctgcttttaacaatggtaccatacaaccactactccattaactccacccacctcctgcacccctccccacacacacaaaatgaaccacgttctttgtatgggcccaatgagctgtcaagctgccctgtgttcatttcatttggaattgccccctctggttcctctgtatactactgcttcatctctaaagacagctcatcctcctccttcacccctgaatttccagagcacttcatctgctccttcatcacaagtccagttttctgccactagtctgaatttcatgagaagatgccgatttggttcctgtgggtcctcagcactattcagtacagtgcttgatgcacagcaggcactcagaaaatactggaggaaataaaacaccaaagatatttgtc

SEQ ID NO: 10 - DNA, 10315 bp, Homo sapiens
agaatcttcttccttcatcacaggatcaacacatttcatctgggcttcttaaatctaaatctttaaaatgactaagttttcttccttttctctgtttttcctaatagttggggcttatatgactcatgtgtgtaagtatctcctatatctacatgtaaacattaaatgaatttctactgactatattgttatattatagatgaaaattattttcacaatcattcctatctttctgaactgtaatgtattatacaaatttttcatcagtaaaattattgtagcttttaggtagggttattgttgttttttaagctttgaaaataatatagtgactgtcattggaagaattacatgaaacagtagtttagatcttttgtgtgaaaccttttggtctacttttgtaggtttcaatatggaaattattggagggaaagaagtgtcacctcattccaggccatttatggcctccatccagtatggcggacatcacgtttgtggaggtgttctgattgatccacagtgggtgctgacagcagcccactgccaatatcggtgagtcctccacacttttccagacatgtgttttttctgaaagttattataggtacaagagaagcttacctctcctgaatgagaatttgatctactgttagcttctgtggttactgaccaactggtggcgtttatttaccttcttccacatccacgctttctgtcttgggttttccttttcagagagaactgagctgcttttcccaggcaagacattagacaaattcaagtcctctgtataatgcagggaacacagcaacagtaatacttgaagcagcagtactcttgaccttgttagatcacactgctcaaaaggaaatcagacaacctgagcttgctctgtgctctgagcttccccattttacaaaggggtaataatcatatcatacctgctttgtgggttttgagaattaaatagtatctgtttaagtattttagcatgcttggcacatttagtaagcacaaaaaaattgcagctattatcattagtattatacgcatgagaagcctactttgccactcctaacagtagctacctaacagtagctactcaccacttacaactttcctaggtggaaaaaaacaagttattgatgacttctagaaagagaaagataatgagagagttattttctaggatacttagaatgaaagcttttctgaagacagagtaaaaccttccaaagtccatttcagcctaggattctcttacttcagctaataaagcacaaaacccctcttgggatgctgcaaccatcacaaaaggaaatgccagtagaaaactaatttggtatttgttgttttgtttgtttgcttgggtttttggttttgttttttgtttgtatatatgtttccttatgtttcttacctaataagctgaaatggagccttctccttttctttcacttaaagatctctcttagctgtaatggtttgctctccaggcattgtctatatctaaacagaacaattgaattgatttgcttttctatgctttgggggttttgtctgattaccccatttaaatggaactgtttgatcacaaattggaagttttgaagcctgcaaactgggagatcttctgctatctctaaatagcaagccactgatttccaatttaatatggttacttcatttacacagggttcttgccctcatagaaatcacactctcatccccatcacttctctcttctccagggcatttgccccctcgagatcagagagacagagtggggaactgtcagcgaatgttcatttgatgcaaaatatgcacatcttcaaatatgctcataatacacattcaaatggtctataacctccccagacacagagcttgacttctaaatgttcaacaaactttggatggaaagaaagaaatacactgaaagatctttctttctttctttctttctttggctaggcctgaaacatggtgtatgaaaaagtgcttcactagccataaagtgttataggaaattaaataatatcactaagttgaattttaaattttgtcaagtggatttaactcacgagaagcggattcccaaattggggaaagagattattgacaaaagactggagagaggtcttggagttttttgtgttttgttttttttttcttaaaacaaactattgctaaatatcattttaaatggctggggtataaagaactgcaaaatatgtagatcaaatttcctctacaggacacttgggtgtaaaaagtaggcagatcggtggttggaaaaatattaagctttatgaaattcaaaatatttacaaaatagctcaatggtggcttcccacaaatgtactccccagtatcctgtgggaatagtttgccccaagcctctctctcagcaaaattttgaagagggccaaacctgggagtgctcccttctcaccagccatccacacatctcctccctcaatattctggcccctttattagttgccatgtcaaatataaaaggaaattgataaaaaatgtcctgtacaaacttattttcagcattttaacttaccagaagcaaaactctcaccagctgttgtaccctgttctcctgattctctcccaggcccctctcacagagcacttcctcctgccccaacctgcctagcaagttgttagatggaaccttccacagccccttccacatggcctcactccatctcaaatgctcaaggctcctggaacaaaatggttcaatgttcaggctctagattcaagccaactgagctttaatcctgcccgaatttgcctcctggaggcaaaggtcctcaagtttattcgtttacctgaacctcaatttcttcatctataaaatggggattgtcataatacctatctcaccacgctgttgtgcggtttaaatgagggaagctttgtaaaatgcttagcacagaacacaaagaacttaatagatgttatcgagtattgttatacaattatctgtgccttccatggtaataaccaaggaactaatctgatgttgacgagataagactgggaagacctccctctctgacagccaagttcttctccctctctcttaggcaagagaaatctccaagacatagggaccctgcctttgctgccagacctcaaggggcgggtctaagcagaaccactgttgagtgtccaggcgcgctggcagagaaaagaagaggcttgaagggggttggcacggggttcaaagagggattgaggaaagagcactggactgggagtcaccaaaagccaaatttgggtcctgattcccctatttatgaggtgtgtcaccttggaccagtcagagaacaatcttttactggtaaggaatacacagcccgtcagctttaccagccttgaaaaaggttattgttaggctcaatggagacaatgtttacagatgtcttcagcagacccactataagccgcactgtagttctgctccatatatgaatctcttccaggaaagctcagggtgggactccggaaaccacattttaaaccaacacctccaggtgattctgaagcaagtctgaagactgcatttggggaaatcctgtgctgtgcaactgaaaaacactggcattattacttcctctttgtgtgaattcagacttcagtttagctaaggaggtggcatcccagaactcaagtaattccaggtaccctgtgggcagaaaatttgacctgagtagcacagattacagttgaaggatatctagaaattgaaaggtcagaaggaataatggtctgcttgggttgtttttggtcttaacatgtcccagtggagacaaaaataaccaaaacatttcaaaggcaataactagccgagtaaattagtaaaagacgaaagaaacccagacattttttcagcatccctcccttagtgagaatccaccctccatacctctcatttgtacctcatagccttctttgtgtgagtcatttaggcacgtgcccacctttctgttagagcattcatcctgaagatttttatgtcatccttctcctacaaagttttgggtttagtgggtatgttgaatttgaattcaaatcaatcctaggaaatccagtccacatcctatgagaaatttccacccggtcctgattttgcaataggcaaacttttcaacaaatagagctggaattcccaaaataaataaaaataaactcttttggtagaaaccaaaaagtggtcattccaggcagtcacagctctgccataagcaaacccactctaccacaggcatttgccattttcaaatctgaaacaatcatgtcttcctttttctgtatgtttctgtgctctttgtaacttttattaatctttattaatctatatgcatgagtatgtgtgtttttactgcaatctactttggtagcttttccaagtagcaaagaaatagttacatgtaaacaaacaaatacaattaaaagatctgaggtggacttcataaagatagacactgtaatggaatgtatctgtagtatacaaatggctctacggttctgccaaaatctccaaaaaattatttctactttatcactgctgtaaatgtaattttatccaacaaagagtaaatcagatcaattgtggcactgttgaaacactggtactagaactgtgtatgaccagagatttaaaaagcaaaccttgccaggcacagagactcacgcctgtaatcccagcactttgggaggctgaggccagtagatcacctgaggtcaggagattgagaccaccctggccaacatgatgaaattccgtctttactaaaaatacaaaaattagccaggtgtggcggcacaagcctgtagtcccagcctctcgggaggctgaggcaggagaatcgcttgatcctgggaggcggaggttgctgtgagccgagatggcgccactgaactccagcctgggaaacagagcaagactccttctcaaaaaaaaaaacgttaaaaaagaaagccaaaaaacaaacctatttcttcacctcactcaccagttcgtatcctctaaatctccccgatggaatggctactaaccttaaagtatcttcattttaaattagcactgttttcttaccttgaggaaagttttcctttcttgtccaaatctttgttctaattgaggggacaggacatatggacatatctgactgtcatgtaataggccttacttccccacattgacctgagatgaagtctaggcatgtgggtgagcaagtgtagggtggggatctttgtggtttttgtttgtttgtttgtttgtttgtttgtttgtttttaagagatggggccttgttctgtcacccaggctgtgacacttcagcctccagctccaggactcaagcaatccctcctgcttcagcctctcaaacagctgggactgtaggcatgcaccaccatgcccagcatgcaccagtgtgccccttaatgtttttttagagatgggggtctcactgtattgcccaggtttctctcaaactcctggcctcaaatgatcctcccacctcagtctcccaagtggctgggattacaggcatgagccaccacacctggctaccttaattattaaaacacttaatgttgggaagataaaaaaagttctggggttctggagatgatagtggtggatgaacaacaatatacatgtccttcataccaccaaactgtacattaaagaatggttaaaatggtaaattttaccattcttataccattatgtatactttaccacaataaacaaattttaatggtagttggtgtaaatctcaaactacaaactcaaggaatataatttgctttatttttacataaatgaacataattttgttttaaacttgatctaagtcaattaggatttcactcctttttcttcccccagttggatacaagttctgatattcttttgcaatgccagggaattggtttagggtgggattaagggcaagtcatttggcccttaatatcaattcatgctgggctccactaagacctttgtcactccacctaatcttaggcaggttaccttggagatagcccttgtttctctgtgtatacaaccctctcgaccatcaccactccccactgggggatttggaaatcattctgctgctttcattgtctttgctttttttaggtttaccaaaggccagtctcccactgtggttttaggcgcacactctctctcaaagaatgaggcctccaaacaaacactggagatcaaaaaatttataccattctcaagagttacatcagatcctcaatcaaatgatatcatgctggttaaggtaggtagtagcattgtcttccttctattttgtcaacatttttatacaggatggctcaattagttaaatcacctacaaaatgcattttgctagcaccctccccatgtttgaggtgattatgatatattttataagggcccatgttattccatatactgtcttgaaagaaacaagaatttatcacaaatgcaccagggctgtgtttatacaaggaaaagcaactctgatactcaacatatgtaggaggggaacatcttaacaggcccaaggatccacactgaaagcttttctcccaaatgcttttctcattagcaagtaaaaaaatacaacagttgtttatacaacagagccaaccaagtgacttcgggggctcagcagtgagttacagcttagtctagaccacacttaatttagtccgaacttggtctagaccatactcaagggtcctatccggcaggaagcagcccagccctcaaagtcatgacctatggatgttattccacacaaaaccatccaatgcagggcaaaggccagtttgctcgagactgaacaaattcctgctctctataagctcccgccccaagcctcagtgagctcctcggggagtagagagcatggtcagaaaagcaacaaccacaaatgcagctgcaggccaccaccaaagtagatcccagaacagggacgcccgcctaagacagagggaccacacatacgacgcacaggctagcatcagaatactactgggaaagaaataattccatcttttttcaatctgtcagcttcaaacagccgcaaaactcaataaacatgtcaagatgctccacataagatccaaaacctctcttagatctggaaccaaatgcaaggttactggctggggagccaccgatccagattcattaagaccttctgacaccctgcgagaagtcactgttactgtcctaagtcgaaaactttgcaacagccaaagttactacaacggcgacccttttatcaccaaagacatggtctgtgcaggagatgccaaaggccagaaggattcctgtaaggtaagaatctctctttcaaacaggcatcttggagcgctgtacagtagccaagcctctattgctcactgacactgaggaggagggaggggcatggagaatacaaaaccacaattctaaacactttctcttcattcctgcacagcattctctattctttttcatctaccaatgtggatggattgtaaaaacttccccaatactttataagcacccactaaatgtttgttaatcaggataatagaccatatctgacaacttttacaggcttcctatgagaggtgttatcctccttacaaagtctaccaaccctgaagtcactagtggtgattagaagataacttatttaaagaaccaccttgcagattaatcaataaggaggccttaaagactcaaatgcaaaaagctcaaatatacagtatgtgtttcataagtaatgctgactgactgtcttcgtctgtttgggctgctaccacaaaataccataaactcggtggcttataaataacagaactttattctgttcaagatcaagatcaaggcaccagcacatttggtgtctggggagggcctactttctggttcataaacagcttcttttcactctaatctcacatggtagatggggtgaggggtctctcttaggcctctttaataagggaactaatctcattcatgaagccttcacctccatgacctaatcacttcccaaaatcaccacctcctaatactctcaccttgggagtgaggattgcaacatatgaattcggaggaatcagactttcagaccataccactgactaacaaaaaggaacaaaaggccgggcatggtggctcacacctgtaatcccagcactttgggaggccaaggtggatggatctgttgaactcaggagtttgagaccagcctgggcgatatggtgaaaacccgtttctacaaaaaatacaaaaattagccaggtgtggtggcacacgcctgtagtcccacctactcaggaggctgaggggggaggatcacctgagcccaggaggttgaggctgaagtgagccgagatcttgccactgcattccagtctgggtgacaaaatgagaccctgtcttaaaagaaaaaaaggaacaagagtcattatgtttttcaaaatcatttgtttattgagatggtaaggaaaaaaataggtgttcatgtttgtatgaactatactaatatatagcacaaatgaattactaattttttaaaaattagaatacagtattcatctcatactatattaagtataattgggggagaggatatgatgacttcaaatgtcttgtgcatctgcagtacccaagaccatcaccctcctaaacatcggttatcatggttgaccaaagtataaggcactgcagtttgcaatgtgaacattagcaaagagaaaggctggtcttcaaatgtagaagccagctcttcatcaaaaggccatgccatcccctctatagctctttcccttcacttgatagaatttagttacatgctttgctgttagagtgtcttcaaaaatcatttcattcactaagtatttactaagtatggtacatatacataacactatgtccaaccatgtgaggatgcaaaaaataaataaataacagagaacatataattcctgccatgaagacatttactacaatacattgctcttttctgctagcctcaataacaactcgattttaggtctgtgagcatcaaaatgaaatctacaattttaaaagattattttatttcagtggattatttaaaactttatccattctttaataaatagtcaatagtcattgattcccagaggaatgtagacatagatagggacaaaacagagatatagacatggacactgagacagaggcagaggcatagtcatagtcatagatagagacataaacagagaagcaagtaggcagaaacatagtccttgacagagacaggcacatggacaacctataacgagtaagaggcagtgtcagacactcttctggacataaagaaagcaaagacccagatgataatcccttgagcaatcagcagttggtggttaaaaaacaaaaatatcccaacagcttcttaccacgtatttgccctttttcttccttccagggtgactcagggggccccttgatctgtaaaggtgtcttccacgctatagtctctggaggtcatgaatgtggtgttgccacaaagcctggaatctacaccctgttaaccaagaaataccagacttggatcaaaagcaaccttgtcccgcctcatacaaattaagttacaaataattttattggatgcacttgcttcttttttcctaatatgctcgcaggttagagttgggtgtaagtaaagcagagcacatatggggtccatttttgcacttgtaagtcattttattaaggaatcaagttctttttcacttgtatcactgatgtatttctaccatgctggttttattctaaataaaatttagaagactctctgtttgtcttttatcacatgaagtaatatctgcccccattgcacccacactcgccaaagggcaataaggtcactgaataaaacagtaatggtaccaccttcaactaggtgtaacttctgctggatcatcctaagttgttgggttgttttcttttcattgttgtgataacattgaacatgagataggcccttgcaacaaatgtttaagggtatgatacattattgttaactataggcatgatcttgcagtgcagatctctagaactgcttcatctcatataaatgaaactttatgccagttgaatagcagctctctatttccccaccacccccatcctctggcaaccccattctactctaagcttctatgagtttgtattttttaaatataaatcataaatataaatatcctaattcaagcaagcagcttatacaaa

SEQ ID NO: 11 - DNA, 3170 bp, Homo sapiens
aaacactctgtgtggctcctcggctttggtaagtgagctgccagcttccccaggcagaagcctgcctgccgattccttctttccttccctgacccaacttccttccaaatcctcctcctagaagccctccttggttggccctgcctactttaaagcttctttcacattttcttaggtcatgttcccctggggcctcctgccctcaaatgctttgctttttggcactctgtagatattctaaaaaatcattttgtacatgtgtgtgacaggccatctcccagttaagttgcagcctgtgctttctttttattttgcacttcccccactatttctgtgagtgcttagtaggaagtgtcaaagaagcttgacagcattttcttctaagtgtcccaactcttggttttccattacacagacagagtgcaagacgatgacttgcaaaatgtcgcagctggaacgcaacatagagaccatcatcaacaccttccaccaatactctgtgaagctggggcacccagacaccctgaaccagggggaattcaaagagctggtgcgaaaagatctgcaaaattttctcaaggtagggctggactctggcaggtctgacccagcctcaccgcagtttgggttgacaagggaggatgggagtatgggctacagcaatcaaggggaagatttgagctcctggagcccagccccaagacgcagcgagtgtcctgttatacagggcaggtgctcacagttacacaggacgacagggtcaagaaattgctcaattgaacacctgctatttgtcgggccctgttctgggcagagggatgtagtggtaaatggggagcccactattccagtggagggagacacacagtaaagttgttggccaataaagagcacagataaagccaaatgccaataagtgcctggaagaaaatgagatagagtgcgctgtgggcaatggggctgggtggggtggaggtgaccagttagggtacatgagaagggcctctttgaggaggtaacatttgagctgagccccgaatgttggggagggaagcccctgaggatgacacttggcacaaagctgaggagaccctaagcctcaggcgggaacttggggtggaagacttgggggcttttctaatcctaagggtctgcggtggaaaatgaatgcataaagagcacatggagagcacctgcacagcactcagggaactgggaggtttttcccccgctccaaaaatgattaggcagttctaagaaaaaggctgagcacttccaacagcctttttgttttcttttcaaatttggggaaagtcgggaaacagaggcctgcattaagaagggtggaacacatgggtctcagtctcagttccagtcccggagccagacatcctggggtaggtccccagccctcccagtgcccctccctccgccttggtaaggtggagaattgcagccttcagagttaggggccctgacagctctccataggtggaggcctcaggcaggcaggatgctgggtggggtaggcaagaaagggcccagcagagaggccgcatggcaaaactatcctccatgtgaccccctatgcccgcttcaccccccacctgacatcccccaccagaagcaaagcgatgctgtgggaaaggaagcagagcctcatggatgggctgcacaggagagtgctcgcattggctgggtaccccacaggttctgggaggggacttagcgaggtgactcagccagagggtggcagagctggaaccaaccagtgctctcttggaccccgcctgggtctgggtcttccacctcccctgatgtctctcctttttttttttttttttttttttttgagacagagtttcgctcttattgcccaggctggagtgcaacggcacaatctcggctcaccacaacctccacctcctgggttcaagcgattctcctgcttcagcctccagaatagctgggattacaggcatgcaccaccatgcctggctaattttgttattttttgtagagacaaggtttctccatgttggtcaggctggtctcgaactcttgaccttaggtgatctgcctgcctcggcctcccaaagtgctgggattacaagcatgagccaccctgtccgaccatctccccttttatactttatcacacccttgaggtcagcggagcacatactctgctctctgaccctccatctcccctgcccacacctagtttttctaggtgtttccccgttgtattggttgaaataagtttcactaattggtaacctccagagggaagggaagggagggcaggggaaggagtgaagtgcagaggggtagcagagtggaactggcctctaagtcagatctgaatttgcatgccctcaatagtcaagctgtgaaaactaatgaccctctctaggactggtttcaagtcttcctccaggaagataccattcctagctgttaaagttgttataaggaccaaatgaggtgacatttccaggcttactcatgccatgaccagggcaagaccctggaactcagcttcctcttctataaatagagaatcagcacccaagtcacagggtcatggagggaataaactggagagcgtttggtatgtgctcagtgtctgctccattgtgcgcactcagcctatggtcatttttaatttttaaatccagccccagggtgaggcttcccttgtacatttgccagctggtcatttactgtgctcccagtccccacctctggccacacccagctctcacagccttctctccccacccgcagaaggagaataagaatgaaaaggtcatagaacacatcatggaggacctggacacaaatgcagacaagcagctgagcttcgaggagttcatcatgctgatggcgaggctaacctgggcctcccacgagaagatgcacgagggtgacgagggccctggccaccaccataagccaggcctcggggagggcaccccctaagaccacagtggccaagatcacagtggccacggccacggccacagtcatggtggccacggccacagccactaatcaggaggccaggccaccctgcctctacccaaccagggccccggggcctgttatgtcaaactgtcttggctgtggggctaggggctggggccaaataaagtctcttcctccaa

SEQ ID NO: 12 - DNA, 32552 bp, Homo sapiens
tgttttgatatcagaatttctggggaacatttggatttccagaatctctttcacatcagctgtaatgtgagtgtgggcatagagctgtcaagtattctttctctttagtaccaatataatgtccagtagctattaattattccaaatcaagtaaattcttgctctagtatgtgttagaacaaaggttgaattctgatcaatatgacactaatacctgtgcccttaggccttgctctaaaatgtcctccttccaatgcagaatgacacattgccccaccctattccttgacactctttcgaaggaatattggatgaaatcaaatcaattttctatctggtgactggagctctgggctgtggttgcggagatggtctggtcccctctcctcttcatatccatctgcttctgttctataagccaccttggtgagtttggaatgacacagttctcttgacgacctgccatagcaaatcagcaatatctcaggatttgggatcttaactaggaactgtatgccacacatgtgtccctgccctgtgatcacctctctgggatgacatgggtgtgtaaacagaatatccgaatagatgtgatgagtcctgcattgacataagcatggagagtgtgaaatagtctcaggaacattagacaaggctcccttgagaaggtgatttctaaaacctagacaagaagatgaagaagtatttgtccacacactccatcctaatttttatgtgccattgccaattggacggaatattatcaggtgaaataagaactggaaaaataaagggagggcaggcccacattaggagtggccaattgccttctggactgtagcgatggattgaaggtccagcaaccccaccccagggagaccctctcttcttttgggagatcagtacgtgagtcctgagggaactgttcagtcatttgccttatcctttctggcctgcttccagactctggggtccagattctggggtcctcccctaagctgcacaacctgcctccaggactggaagtttttggattttacactgctgtttacataaagtagtattgactagaatttgcacaaatacattttatattgaaaaatgatatagagtacttattatgagctggaatccagtactactatgtgctgggtaaccaggagatccgaggtaacaatgttttccctccatgattccaagtctggctggaaagacattaggggaatctgaagtaatgtagccactatggtaagagtggggtcatggtgagggaggcacaaatgaagcagagatcatttctttggggtgaagggatggtggttcaccctctgaatgtctaagagacactgacattaaagctcagccttgaaatgtaatgttaatgagacagaagaagtattaaaagacatttctggtagaggcagtagtttaaaagattggtattgagacatgaaatactgagatatattgatggggggtatgttgcgcattcggggaataacagcagcaaggtgaataggagggattcagagagtgctgcacagagaggaagtcaggcacccacacttttgggaccctggcatgacggttctaagcagtgaccagcagtcccggtggaggagagaggaggacaacaggggaagatggttctgggctggagatctgcagggaaggtatggcccaaggaaagtgggcaacagagctaagagaggaaagagagcaattctggggtggatgatggagggcaggctgcatagagaaggcagcagggggctgggaggagaaaatgaaagcccagggactgtaggtctccgtgagttccaagaacaggtggaatgagaatgagaaagggagagaaggaaagagaagaaaactaatggtcagacatggggatttagaggtgaaaatggcagatcagtcctgaaggctgacgaggtgcagaatatgttcaggaaggaatgttcctgataaggagaggagatgctggtctgtgaatagaggtgtgagtgtggagtggagcagtcattccaaagaacaaatagcccatcttacacactgctgctggtaggatggaaagagaatttttgagatgtttgcctgattcctccaagaagaatgtttgcctgattgagaggttagctggagactgaccagagtagtaagagtgatagggacacatgatgtgagcctcaaggaagaatactaagagcggctgcacagaacattgcctggaagtgacaccaggtgaacactgaccctgtgttgtggcctgcatggagagacccgccagtgcactgctaggacagcactgtgtcctgcctgtttctgcatcctcagcccataacacactgcctggcctggagtagactaccaataacaaactactccattacctgcgagatagaggtgctgcaatttctcatcacagtcagcatgagctctctgtgtcagtccttacagaatttccgtgatgctgccttattccagccagactgcttacttggactcctggaccacttagagctcctcaaaatctggaatattcattcatcaccagaaacccagtcctggcattgagcaaaccatcatttaggacagctaagcatcacagtgactccttctcacttccacagggtcacccacataggcacatgcacacaagcacacagcacagggaaaggacactgcccctggagcagaggccacaggacaaggaagcccatcctcagggcactgctgagcctcccattcatagccccaagggcgctgaacctgaagccatccaggaatccctatgtgagtggtttctgtttccccaagccctggagaacagctggggcaggagtgggagggcaggagcacactgagagatgccagctccttctcagtgcagtatctgaatgtgtctgaatgaccctggtccatgccttgacaaggagagcattgctgtgacctggcaggggccttctaccaacttccacctggaacctgccaaggtggctgcatttagggaacggtgcagaggcagacaccaggacctgtgtgagaggcagatcagctctgctggaggccatagggggaacgttgctggagggacattactcctgggtgacccactggatgggggtgggggaaattctccaacaaagttaacctggaattggtagttttgacaatgtaggtcaccaaagagaagaagaaataaggcaagtgtctggtgggaggagacacttattgttcctggggtctctggaggccccttggtggggctggatcactggcttcccccagaacagggcgccgctccatggctctgcttgtggtagtctgcggctatgtctcccagcaaggacagaaactcagaaaaatcaatcttcttatcctcattcttgtcctttttctcaaagacagtggcgaggtaatgtatgccctttttgtcctgtgaagagaaaaacatacaaaatagaaaaattcaatcacaaacaagttttgggctgggaggggagaggaggaggcagagatacagacaagtacctagatctgcacaggcatggtcgtggggctgagagcacagggtgagtgggtgaagttggggtgaggacgtgagtgttatccctggagttctctaaggagactttttgtctcacacctcaggatgggaggcaggtcctgtcccgaggcactctgttaagtgaccttggggagagcagtcccctgccccagcctcaatcttgcctgttcccagcatttaagggcactgcctaccttagttctaccccagggcctcaaaattggccctcatgctttgttctcttctttctctgacctcctctcctttcttctccttttccaccaaactcatcttctgggttccctactcttggtcatctagaccctttggtacctagtagcccacaggttttttcagatttgccaatgagttttctttattgcaaagagggctattgatttctactagcaatggaacttctagtgctttcccagtaatctcagggatgttgatgtggggcctttgggaagcaggacctgagcatgtgagtttcagtctcacagagagagggtcagtgagcgctgggaggggactgtgcactgtcctcaagctgcacactttgctgaccatctaataacctcctttatatctgtataactctttcccattttcatactttttcgcctaccatccttagattcacatatgatccaagcaataaagccctatttgcaaatgggaaactttttaatcagaggatgagggtgacctgtccaaggccacatagcaaaatgtatcctcagccatgccagggtccaaccaacattgagaagctagaccccaactcacacaggcactgaggaaattggggaagttctccttcatcatcgtcagcaggcttggcttctcaatcttgccatcacgtccggtgtatttgtgaaacatgtcgatcatgcctattatggacctctcagcttgagtgttgctcatctttgctttcaaaaagccttcaggaaataaagacaatcatttcttaccttagtttgaattaaggtctctatgtgggggtgttagaaggagggctgaggacagagtaaaaacagccctaagatggagcagaaggaacttgatttttttaaatgtgatgggataagttgttcaaaaatgagagggtaggaccaagtctgagacccggcccatcctggccagggccaagaagagatgcaggtggatggcagaagtccagctgtggacagtgcttcagagaaggagaagcagggagagtcggaggccagcaacacatagaagaactaagctgggaccccccagcctcaaccagcacatggcggaccccactcttgaaacagcaccaaatccatctcctccagcttcacagtcggggtgagagtcacgggggcaggacaatggccttggtgatctggtgtctgaccctcctcggctgcttcaggaaccagacaccgtgggccccaccttgactcaagtgcaagccctgcatgacacagtgcgtgcaggctccaggtgcacatgtgagcgtggacatgagtgtgagcaggaaacacagccctctcccgaggacagggggcccttcctacattcccttgggaatgagaaacaagaattgcctctgttacaaggaacagaaataactccctggttcttaagctgctggatggggtgggagtgaggtgggagtcgcttcatgtctgctcttgggaaatatctgcaccctctgaatcaccaagggttgaccctgtttaaataaaaatgtctgactttccaaagcagatcttccagccagtagccagcctgggctgccctgcaccccaagcctgaaaaataagacagtgcagctctcatttctacactttccaaagaaccagaaaaggaccttggctaacgcatgtgggcatctgacaataaacccccaacacctctcaacgcaggagaaagctccgtgccagcaactgactaagagaagccactcaaagctttctgaatctgaggccaaggccaaggccagaggccaagccctgtgcccagagattgactgagaatttacaggtccaaggcctgggggtttggagagcctccaaagcattcacaggggatccttatccctcctccctctgtgggggcagagctggggaggggattcagcaactgggatcccaaaaggagaatgaatccagggaggaagaagacaggaaggaaagggagggtcctgtgctcaggtcccactggggacatttccacaggagttgtctcaggagatcccaaaggagcaatggacaggtctggttcagccacctggttgtacagacgtgggcttttggggtcaagtgaaggtcacacagcccagctaatggcagagctggcctagacccaggcttctgagactttgtccacagccctttcccttcctacaggcagcatggcaggctgggcactgggcacttctagaaaatgcaaagaggcaggtgagacttaccagaactgggaagtgtcacgagtagaaggatgagtgagatgtgtgtgtttggacaaagagcagtcctttataaggctcagcctggctcttcccacgggttgggaggcctggggccacctctgtcatctgtttcttggaggcttgtcccatatcaggtgtgtgggacacacccaggaggctgtgctcaggatttctggccagggtcccaggtcaccaggtcccaccccaccccagagacctcacctggggccttctctggctcaatcttgatttgagggtaaggcagcggtacatgtgtagtaacaggtcaggaaatgggagaaaagagcactgggcctctggacccaaagagaatggagtttcagactcccaaaggcagcatggtcttgtttattccctcccccagtacttccacacatttgttgtgacagcctgttctatgacccccaccgcttactgagcgttttaatgtctagacatcaagacacctgctgctcttgcatcctcctcaaccctcccctcatagtcttaagaagcaggtgctgcaatctctattttaggaaaggagaagttgagatgttcccaagtttactcagctagtaaacacaacaaatcatcacacgaacaaagaaaagcctgaatcaaatccttactcttatcccctgtgctataggtcttgggttgcatcagggtctgccctatgggaactcaaagtccagggagggaagcaggattacttcattgctaaccattggtcagcccctcacagaagccctggatttaggtggggggactggggtcaggggcctcactatctaggttgagtggtggagtgacccccgccccccccgccccatggaatgagcctggaggtagggagtgggaaaagttctttcctgccccatggcactaacttcccagaaagtcttcagtgtttttcctcctcctatgcaaaacagcctgtgtaggagttgggagttgtgcccttggctataatgtgccctaacctgctgtggaaagcctgaaccaggtaggggcaagagggttgggaaggcacaggagtccctggggcatggtgaggaaaaggagatgatgaatcactgaaatggactttttctgctacccccttacaatgttccttgtaggccgcaagaggtcctggttcatttagtgccagccctttaagcactctggggctccatagagctgatgtgatgtctccctaggtgggacctattttctccacccatcatctttcttcaacttccttctctgtcagttcttatgtaaccagggggacctgtttctccctctcccagtttcccatatgacggcaatattacttttagcggcaaaagatacacacacacacacacacgcacacacacacaaacacacacacaaacgcacacatacacacacacacagacgaatactactcaaccataaaaagaatgaaatgatgacttttgcagcaacatggatggaactggaggctattatcttaagtgaaattactcagaaaaagaaagtcaaacactgtgcaccctcatgtgtaagtgggaggtacatcatgcatacagatggaggtagagagagagtagaatcatagacactggagacagtgaagagcaggaggtcaggtggtgggtgaaggaggagacatttcttagtgggtacaatgcgtgttatttaggatggctgcattaaaagcccggacttcaccactgtgcaatgtgttcatatacatgtgtatgcaggtttttgtgtggacataagctttcagttcttttgggtaaatcccgaagagtgtgatttctggatcctatggtaagagtatgtttagttttttaagaaagcaccaaactgtcttcccaagtggctgtactattttgtgttcctgccatcaatgaatgagagttcctgttgctccacatccttctttagcatttggtgctgtcagtgttccagattttgggcattctcataagtgtgtactggtatctcattgttgttttaatttgcatttccttgaggacatatgatgtggagcatcagctgatatgcttatttgtcaccttctgtatcttctttgatgagatgtctgttaaggtctttggcccattttctaattgtttggtttgtgttcttatctctgagttttaagagttctttgtacgttttggataacatacaaagtctgatatgtcttttgtaaatattttctcccagtctgtggcttatcttttcattctcttgacaatatctttcacaaagcagaaatgttaaattttaaagaagtccagcttatgaattatttctttcatggattgtgccttggtgttgcatctaaaaagtcatcaccaaaaccaagatgatcaaatttcctcttatgctaccatctaggagttttgtaatattatgttttgcatgtaggtctatgattcattttgagttacatatcatcactgtttataaaaaaaaggaacagaagaaatgcaatacaaaaggaatcagggacaacaatattaatacaagacaacaaagaattctaagaaaagggattaaatgaaaaagaagaatatttcctattgattagtgtgcaagtcaccaagatgcaatagtcttatcttttttttctttcttgttttttcttttttatgagacacacttttgctcttgcagcccaggttagagtgcagtggtgtcatcttggctcgctgcaatctcctcctcctaggttcaagcgattctcctgcctcggccttctgagtagctgggattataggcgcctgccactatatccagctaatttttgtatttttaatagaaatggggtttcatcatgttggccgggctggtctcgaactcctgacctcaagcgatccactcatctcggcctcccaaagtgctgggattacagttgtgagccactgcacctggcaatagtcttatccttatatacacaagaacataatattgaattatacaaagcaaacattgaaataaattaatgaaaactgacaaatttatatcacttggcagtttctggcagagtctgcccaggaactcaacagagtcgtcagataacaaaacaccagtaatggtgcagagcagggcgggcagatgctgccacagcccagaagcagccctggacataagggccccgtggatgaagacagctgtttctagtaaacactaatctccagaattggttggccagctggatttggctttaagaccataatttgctgattcctgatacaaaatatttgaaggacacacttaaatttatttatatacacgtgcattcataaatttgtgcctgaccatagagaatacatataaatttctttttttgtattgaggttctttattaaattaattatataatctgtattagataattaacgtttttacaaaaattattattatactttcagttctagggtacatgtgcacagcgtgcagtcttgttacatatgtatacatgtgccatgttggtgtgctgcacccattaactcgtcatttacattaggtatatctcctaatgctatctctccccgctgccccaacctcacgacaggccctgatgtgtgatgttccccttcttgtgtccaggtgttctcattgttcaattcccacctatgagtgagaacatgtgatgtttggttttctatccttgcgatagtctgctgagaatgatggtttccagcttcatccgtgtccctacaaaggacatgaactcatccttttttatggctgcatagtattccatggtgtatatgtgccacattttcttaatccagtctatcattgatggacatttgggttggttccaagtctttgctattgtgaatagtgctgcaataaacatacgtgtgcatgtgtctttatagcagcatgatttataatcccttgggtatatacccagtaatatgatggctgggtcatataatggtatttctagttctagatccttgaggaatcgccacactgtcttccacaatggttgaactagtttacagtcccaccaacagtgtaaaactgttcctatttctccacatcctccccagcatctgttgtttcctgactttttaatgatcgccattctaactggtgtgagatggtatctcattgtagttttgatttgcatttctctgatggccagtgatgagcattttttcatgtgtcttttggctgcataaatgtcatcttttgagaagtgtctgttcatatcctttgcccactttttgatggggttgtttgtttttttcttgtaaatttgtttgagttcattgtagattctggatattagcccttcgtcagatgagtaggttgcaaaaattttctcccattctgtaggttgcctgttcactctgatggtagtttcttttgctatgcagaagctctttagtttaattagatcccatttgtcaattttggcttttgttgccattgcttttggtgttttagacatgaagtctttgcccatgcctatgtcctgaatggtattgcctaggtttccttctagggtttctatggttttaggtctaacatttaagtctttaatccatcttgatttaatttttgtgtaaggtgtaaggaagggatccagtttcagctttctacatatgggttagccagttttcccagcaccatttattaaatagggaatcctttccccatttcttgtttttgtcaggtttgtcaaagatcagatggttgtagttgtgtggtattatttctgagggctctgttctgttacattgctctatacctctgttttggtaccagtaccatgctgttttgattactgtagccttgtagtatagtttgaagtcaggtagtgtgatgcctcccactttgttcttttggcttaggattgtcttggcaatgagggctcttttttggttccatatgaattttaaagtagttttttcccaattctgtgaagaaagtcattggtagcttgatggggatggcattgaatctacaaattaccttgggcagtatggccattttcacaatattgattcttcctatccatgagcatggaatgttcttccatttgtttgtgtcctctcttatttcgttgagcagtggtttgtagttctccttgaagaggttgttcgcatcccttgtaagttggattcctaggtattttattctctttgaagcaattgtgaatgggagttcactcatgatttggctctgtgtttgtctgttattgttgtataagaatgcttgtgatttttgtacattgattttgtatcctgagactttgctgaagttgcttatcagcttaaggagattttgggctgaggcgatgggattttctagatatacaatcatgtcatctgcaaacagggacaatttgacttcctcttttcctaattgaataccctttatttctttctcctgcctgattgccctggccagaacttccaacactatgttgaataggagtagtgagagagggcatccctgtcttgcaccagttttcaaagggaatgcttccagtttttgcccatttagtatgatactggctgtgggtttgtcataaatagctcttattattttgagatgtgtcccatcaataccgaatttattgagagtttttagcatgaagggctgttgaattttgtcaaaggccttttctgcatctattgagataatcatgtggattttatctttggttctgtttatatgacggattacatttaatgatttgcgtatgttgaatccttgcatcccagggattaagcccacttgatcacggtggataagctttttgatgtgctgctggatttggtttgccagtattttattgaggattttcccactgatattcatcagggatattggtctaatattctctttttttttgttgtgtctctgccaggctttggtatcaggatgatgctggcctcataaaatgagttagggaggattccctctttttctattgattggaatagtttcagaaggaatggtaccatttcctctttgtagctctggtagaattcggttgtgaattcatctggtcttggactttttttggttggtaggctattaattattgcctcaatttcagaacctgttattggtctattcaggaattcaactttttctgggtttagtcttgggagggtgtatgtgtccaggaatttatgcatttcttctagattttctagcttatttgcatagaagtgtttacagtattctctaatggtagtttgtctttctgtgggatcggtggtgatatcccctttgtcattttttattgcgtctatttgattcttctctcttttcttctttattagtcttgctagtggtctatcaattttgttaatcttttcaaaaaaccagctcctggattcattgattttttgaagggttttttgtgtctctatctccttcagttctgctctgatcttagttatttcttgccttctgctagcttttgaatgtgtttgctcttgcttctctagttcttttaattgtgatgttagggtgtcaattttagatctttcctgctttcacctgtgggcatttagtgctataaatttccctctacagactgctttgaatgtgtcccagagattctggtatgttgtgtctttgttcatattggtttcaaagagcatctttatttctgccttcatttcattatgtacccagtagtcattcaggaggaggttgttcagtttccatgtagttgagtggttttgagtgagattcttaatcctgagttctagtttgattgcactgtggtctgagagacagtttgttataacttctgttcttttacatttgctgaggagtgctttacttgcaactatgtggtaatttttggaataaatgtgatggaataaatgtgacgtggtgctgagaagaatgcatattctgttgatgtggggtggagagttctgtagatgtctattaggtctgcttggtgcagagctggatatccttgttaactttctgtcttattgatctgtctaatgttgacagtggggtattaaagtctcccattattattgtgtgggagtctaagtctctttgtaggtctctatggacttgctttatgaatctgggtgttcctgtattgggtgcatatatatttaggatagttagctcttcttgttgaattgacccctttaccactatgtaatggccttctttgtcgcgtctgttctttgttggtttaaagtctgttttatcagagactaggattgcaagcactgcttttttttgctttccttttgcttggtaggtcttccttcatccctttattttgagcctatgtgtatctctccacctgagataggtctcctgaatacagcacactgatgggtcttgactctttatccaatttgccagtctgtgtcttttaattggagcatttagcccatttacatttaaggttaatattgttatgtgtgaatttgatcctgtcattatgatgttagctggttattttgctcgttagttgatgcagtttcttcctagcatcaatggtctttacagtttggcatgtttttgtagtggctggtaacggttgttcctttccatgtttagtgcttccttcaggagctcttgtaaggcaggcctggtggtgacaaaatctctcagcatttgcttgtctgtaaaggattttatttctcctccacttatgaagcttaatttggctggatatgaaattctgggttgaaaattcttttctttaagaatgttgaatattggccccgactctcttctggcttgtagagtttctgccaagagatcctctgttagtgtgatgggcttccctttgtgggtaccctgagctttctctctggctgcccttaagattttttccttcatttcaactttggtgaatctgacaattatgtgtcttgtagttgctcttttcgaggagtatctttgtggccctctctgtatttcctgaatttgaatgttagcctgccttgctagattggggaagttctcctggataatatcctgcagactgttttccagcttggttccattctcctcctcactttcatgtacaccaagcagacttagatttggtcttttcacatagtcccatatttcttggaggctttgtccatttctttttactcttttttctctaaacttctcttctcacttcatttcattcatttgatctgcaatcactgctaccctttcttcctgttgatcaaattggctactgaagcttgtgcatgagtcatgtagttctcgtgccatggttttcagctccatcaggtcatttaaggtcttctctatgctgtctattctagttagccattcatttaatctttttttcaaagtttttagcttctttgcgatgggtttgaacaaactcctttagctcggagaagtttgttattactgatcatctgaagccttcttctctcaactcgtcaaagtcattctccatccaactttgttccgttgctggtgaggagctgcgttcctttggaggagaagaggtgctctgatttttagagttttcagcttttctgctctggcttctccccatctttgtggttttatctacctttggtcttttatgatggtgacgtacagatggagttttggcgtggatgtcctttctgtttgttagttttccttctaacagtcaggaccctcagctgcaggtctgttggaatttgctggaggtccactccagaccctgtttgcctgggtgtcaccagcggaggctgcagaacagcaaatattgcagaatggcaaatgttggttcctgattgttcctctggaagctttgtctcagaggggcacctggctgtatgaggtgtcagttggcccctgctgggaggtacctcccagttaggctgcttgggggtcaaggacccacttgaggaggcagtctgtcagttctcagatctcaaactccgtgcttggagaaccactactctcttcaaagctgtcaaacagggacgcttaagcctgcagaagtttctgctgccttttgttcagctatgccctgcccacagaggtggagtctaccgaggcaggcagacctcctttagctgtggtgggctccacccagttcgcgcttcctggctgctttgtttacctactcaagcctcagaaatggcgggcaccctgcccccagcctcactgccgccgtgcagtttgatatcacactgctgtgctagcagtgagcgaggctctgtgagtgtgggactgtccgagccaggcacgggatatgatctcctggtgtgctgtttgctaagaccactgaaaaagcacagtattagggtgggagtgacctgattttccaggtgccgtctgtcacggcttcccttggctatgaaaagtattccctggccccttgtgcttcctgggtgaggtgatgctcaccctgcttcagctcatgctctgtgggctgcatccactgtattgctcccactgtctgacaagccccagtgagatgaacccggtacctcagttggaaatgcagaaatcacctgtcttctgcttcgctgggagctgtagactggagctgttcctattcggccatcttggaacctctccaaaaatatcaaacatatttgagacatccaaaaaactgatcatttgtttttgctaaaatcaaaatcttagcaaattagctttaataggggccttatcttttgcacctgctcatcaggttgaaccctgtgagcctttcccctgtgtcatgtctggaacaaacactctccataaacccaccccatcctatcacacatccaacctcccagccactgctgatcccccaggagagctcacaacaggctgattgtgaacaggaatttggctggttgatatcttcatctcctctatcgttttggggagctcgcctctccccagcctgaagtagaagcaacatactcctgggtctctagaagatctcaagttgctgggggaagaggacagaaagcaatttgttctttttgctgtattttatccattcatttatgctgtgagtgctgactctgttctgggtgtgcaggtgtcagggtggcagggagatggagtggatgtggaccatgctttgagcaatgctctggccccaggagagaactccaatataaggcactgggtggtgagagagtagagtgggacagagcccggaagcccccaggtccccaggcagttcagtggtcactttctctgtgaagccttctccaggcagagccatcatccccatgtccctgcatgtctcagtgacagccctggccacacatatgctatgtttgctgccgcccagccatgtcttatattgtgcccccagcctccagtgcagagaactccataaacattggccaaactagcaagtgaggcaggtgtcttcaaaaaggttcagataaagtgtgtgggaatttggaagaggagaaatcacttttcaggtgggggaaccaggggaagctttgtaggggcatcctttcaataggccatagagcacttccaggagccacggtgagagggacagggcagagggagccacgggaatgttccaagacagccagctgttctgtttggggtccttctgggtggtgctggccagctgcatctctggactcgtgcagcagttgggggagcgggacagagagacagagagagagttctgcagcattcacaagaggttattaggactcagttctgctgtgagccatccacactggaggatgagaacacccagctgcagcccagagcctgtggtcccactgttaggttttgaagggaaggcaagggttaaaaaaagacacagagagagttggtggctctatggaaatgcaggttttatgtccagcacaagacctgaggaggtgggggacaagcttaatgccagagccccctgccgcttacaggctggggtaatttataggtctaggtgggggtctgggcagtatggctagctcgccgggaggatattgataagatgttcctgtgatcaggcggtttggacctttttccagcgggatgtgataggctgtttcttggacctttgccccgcaggatatgatggggatgttccttcagttgcgcctttgcccagcagggtatgataaggatgctcttgtgccttgcggtcaggtggttaggcaggatgtttctcacggcctgaatccacatggaatgtttcactctgaccagggtccgcaaaatggcagggggcttacaaaatggtgcagtttggactaacacccaccatcctgtcgaatgggtttgctgggaggatttactgtcaattctgttagcctgataagggaggttgctttctcggaggccgcatacacagacagtgctaggaagtgacccaagcgtaccctgagaaatgtatctgttcaaccaaatttcaagttggcaatgatcattcctcatctcgcccaattttaagacgaggctgggccgtgtaggtaaaactggcaagctggagaaagcagtgcggggtgggggggactccaggaaggctccttggccaaggaggactgtaggattctgacttacactgtaagggctgttcctgttacagttggccccagtcagaggcccaggacaaaactctggccctgagtgcagagaattggttttctgtttcccaagcttccacacggtggcgccaccgagcacccacctcgccctggttgtcgccggaggcagtaccacgtggctgggtccttcgtggttcccgcccttctgtaggttgtgagtcccacgtcgggcaccaatcttgcacctgttaaaaaaagagatcttcaccaaaagcttctgaaaggcagagggcttttcttacttaatttgtattcttttctctctccaatgcttaccagaggacactgcataaaatagtatattggggacacaattgttaatcaagtggtagaaacaggaagagataaaaataattaaatttttagtaatggtgggttaagtaaatcttgatgcctatacacatggaatccctgtgatgatacgaaatggacatttggtctttgtccctgttcctgacaccgagcgtctgaaatccttggaatctcctgaatgacaggggagagggagcatcttttgttattcataacaatccccttccagtcatgctgagtgtgtgctaatgaggtgactcttggtggacccctagatagcttcaggatggggctggttgccagaggaagcaaccatgtgattagagggctggagctttcagccccacactgggcctccacagagcggctggggaaggacttcaatcaccagtggccaattatttaatcaactatgcctaaatgaagtgactgccatagaaaccccaaacgatggggttcagagaactgtagggctgctgagcaggtggggtgccggaagggtgggctcctggagtgggcctgggagctccatgctgcccctcatacatggccctgtgtgtctcttccacgtggcttttcctgagttgtactctttgtaataaaccagtaatcatgagtaaagtgcctccctgagtcctgtgaactcttgtagcagattatctaacctgaggagggggtttgtaggaacctccaattttagccagtcagtcagaagtatgggcggtcaggtgctgcgattggcatctgcagtgggggcagtgttgtggggctgagccttcaccttgtggggtctgtgctaactcttggtagttaggatcagaacggaattgcacgataccccgatggtgttcagagtgttggagaattggttggtgtggggattttaaaaaaaggaaatataacccccacacatttggcgtcaaaagtgttgttagtcagaatggttctggaattccatataatgtagctatttggaatcaatcactcaaaaatatttaagaactggggagatgttttaaacatagtcctaattgaaaaagcagatcataaaacagctgggaaagggcagggccgtggcccacagggtggacgtggagtgggggtggggagggggttaatgtgacatgattgctccacatgagacaaggccacggaactcaggaaacaaagcttgttttgagcaagagtcgtgtcagatttcgacaggaggtagagcagagagaagatatctttacataggtgaagctaacagttcatgataaagtgttctcagccttcacattcacagtcaattgattttcaacaagcccgccaagccaattcaatggagaaagaatagtctttccaacacatgatgctgggacaagtggacagccacatgcaaaataatgaagctggaccccttccttccttcatacacacaaattaactcagaataggtcacagccctacacataagagctaaaactaaaactcttagaagaaaatatagaagtaaatcttcaagactgaggtcttgaatatctttgcatatgctactgaggctttatgactttactttccacagttagacctacaatccacttggaattgtcattttgtctgcttgtgtggtctagtttcatgagcatgagcatccagttgatccagtaaaatgtattgaaaagcttgtgctcagcagtgccacttttgtcacagaataaatataccatacgtgtgtgtctttttctcagacctctatttagttctgttgatctatgtgactgtccttgaaccagccaggcagtatcttagttaccggagctgttatgataaatcttaacatctagtactgtagatcctcccatgtcttttctttttcatgattcccttggctattcttggcctgtctatatactttttacagttaacttgtcaatttctacaaaaattccagcaaggactttgggactgggattgcactgaatctataggttacgtttgggagaactatcagctttacaatagcatgtaaagctgctatgaacatggcatatcccttactaaaaacttttagtggcttcccatcctgcttaaagtccaaattttgcaaagtcctcgttggcttgtcctctgcctgcccctcagacctcatctcctgtctttctgggctccatttacaccactccagcccttctttctgcccctctgtcagcccaggctggctcctacctgagcacctctgttccagctctttcctctaaccatggggcccttctcctgctctccctaaggttggatttcctgttattcggggacaaggtaatgtagtggttgagaacaggtatgtggggcccatgggcctgggttagaaatgtgcctctgcattactagctgtgtccccagcatgctcctgtaattgtcattccttgggctttttcagcaattgttaagaagatgagatgaatgggtggatgtaaagcccatggagcagtgctcagcaaagaggaagaacttaatactgttaatcatcttctcactctccagcagcctcctggtcctacagaagcagcctagggactccctatgctcaaatcctattctttttctctacacggcaataatgtaccctttctttctctttatcacattttctgtgaggattctaatgcatctagcagctcccccttcaagcacagcccatctaacacacatttcagatactcttgaggctgttgactgggatatcaggttgctctaatcctaaagataaaaaaggtctggaaaaaagaaaatagatatacactggtaagaactggcaaaaatccctaaatattccatcagtataacccgattcatcgtctcaagtaccatatgagatttctttaatttttaaggtaattacttgatcctcttcaccaccacctcaccgccctcttagtcagaaattgaatattatcctgcttgaagtatttccaattcttgaggtgtctaaaaccctgggtgcggccgaagcggggatgggggtgcttcagggccagtttcgggtaacctcctttctcaatttcaccagaaagcgctactcctttgctgtactggcttctggatgtcacgggacattgttttcagtgtctggtctgcacactggaaagacatgaagactgtgtttgtcaagatcacaatcttagtcctggccatgggtggttgggttgtgacatgggagatgcatgcttggcaccatgtttatggttcttttctaagtacagtaacctgaagttttggccaaatgtctgtctccacctacagactatgagtttctggaaggcagaatgttattcaattcatttccgccccctttctccacagcacctagcacaggtgcacctagcacctaacacgtggcaaaattctgataaacattaaggaagagttgacattaaaatgtataaataaaagtaatttaatgtctaacaataatggattcataagacaaattttgataaatgcaaacagatgatcgctatgtactcgccaaaaatcaggctagcattgattaagcatgtgagatgtccacagcataacattaagcaaaaagtgcagttacagcgcagctgtgcaagggatcatcactgggtattggcatggcgtagggggctgttttgtcccagagtgaacaaaaggtagggtgaaaaggagtgcagtctgccccccatccccagccataggtcagaaatgaagtttcttctaaacaacaagctgttatccagcaattgtccaacagtaagccatatgggtataccaaatttgttaattagatagttttaaggttttgcttttatttttgtttcttggttatggatattgcaatggtggacattttcctgatgatttttaaaatatctgtttaattaattgttttgggagaaattgccagggtaatgatggctgaaccaaagaattcgatacaattttttgtagctctagcttggcaatgctgagaaattcaagccatgtttttagtttagaaacaggaaagtgtattgatgaaccacttgtttgctggggaaatctttatgttgagtagatgaaggctcacccagcaaactggaaaagctgttggcttcggtatctacctatgattttctctccagccttcagagatgcatagatggagtctctggtttgatgacctgccctttggcgccccattctggaagattcagtcatcagcctgtgcaggccctcccaagggagctgtgtggggtgaaatggggccaagtagaaggggccggctgggagaagtcttgtgttggggtgagttggcagaggggaccccacctgtcactcactcaggggcccaggtagcatctgtagggatgtcgagcctgaaggtctggcccctctcagagtagggtgacttccacattgcagtcggtgatttactagtaaacaaatctggttctaccacttctctttcacctcccgtccatcacccaactgatttaaaaaatcctctattagcttcctctcttgtttgtgtatcacagtcttgccctggccatgggtagtgggggttgtgaggtgggagatgcgtgtttggcaccaagtctgtggtgcttttctaagtacagtaccttggagttttggctagatgtctgcctccactgacagactatgagctggataggataaagtcacagttgtagcttggcacagggtcttccggtcttgtctccctcctgcctctccagccttgtttcttctaacttctcattgtgcaccctgtggactccatcccctgagggggccgcgctcttttacagccccgggcctttgcctgtgccatatcctctgtctagagtgcctggttctcctttcctccttgcaactcaaaatgtctcttcaagtcgcagctgaaatatcgcctccctaaggaagtcccccccaactccccaggtggaaggtgtccctttctgggtgcctggagcacctgtctgtgtcactcagttggcttccatgtgcctagtgacagtgtgtgactgtcccctcacatgtccccaccctgtgagctggccctgtatctgatgcatattgcctagcagaaggcctggcacactgtaggtactcaagaatattcgttgaatgaatgaaggaatgaatgtgcttcatgacagtggagtttgggggttcactaatggagggaggacaccccagggagatgtagttaagtgtgtgtctgaccccacccaagccctggagctgagaggacaagctctgaggcagggagacagataatgggaccttttgtgattcttagatgcttcagatcctgctccaagggatgtgggcccctgaaactggttgagttaatcttagcaagttaagtgttgtgatgtcacctcaggaatgcaattaaggctcagtcctgctcctgaaggacctgtgaagcatcacaacactggctgccataattggaggcattgaggatgggtgggatgtggggcttggtggtgggttcgcggctcacacaggtgcctcctgcctgagcgttggggaatctctgggatcaactacaggctggatctgtggatttggatactcaccccaacagtgacaggtcagtgcctcttccaagagaattgtgggggtgagggtttgtgttggatctgtgcaggttctaaaaagcagaggtggggacagtttacctgtttggagaacacgtacagtgtggatgggcatcccaacagcacaatcgtggcccaaggcgggtgtaggactggaactgaaagcatgcctttgggcttgttcccaaagacatgggtttgaacgaagctccaagtggatcattgtgtgatcttggggaaattacttatcctctctgggtttcatttcccccttaggaaactgggggtaaatatgcttgctttctatggcccacgtgagggttacgtgggatacgggataatttgtataaagtgcttacctggtgcctggctggctccatgagcggtggaagcagcagttgtcctgattcctatctgtagagtccagggagcactgctgatctgacagggtgatcttgtctcatctccagaggaagtggggagtgggaggtcacaggcatcagagcaccagagaggagctgcacagaggctctgggagggccatgggaatgtgagggctgaagggatggtgctgatggcatggggactccctctggagagggtggcacagtgtggtggcagcaggaagagaggtgggatccatgcccgggggaaggatagcagggactgcggtggcccccctaaccagggtgggagtagggtggggtggggttaggaaacattacttccccttccacctcttatccccagagtctctcagacctggacaggcccagcacccaaatccgggcttagacagccctcaggccctgcccatcttctttgtcatcaaacgtagacccatgattactgggctccttggggcctgcaagggtgtctgtggggtgctgctgtctatccatgccctggggtgtctggactgtcatctccagaggacttctggtccatcctgactcaaggccactccatccaggaaaaggctcttcttcagtcacttcccatctccccagccttgcctctgcttactggagtgttactctgagggttgtagagagggacggagtgagggggaagtgattgttggtggtcctgtttccaggaaaccttgtcctttccagggcaaactgtaccaggatggcccggaccctgcactcatgggggtcacagccccgcctgggtacggggcccttgcggggatagaacctggacacagaaggcggccctggggaaggtgggccgaggtgagggaagctgggagagcctgtcccgggcaggaagcctccagctcctctctgggtaaccagctttgtggaacagttaagatcacaggaacaggtggtgggggtgggccctgaggggagagagaggctgcaaacctgtccacagctgcttcccccagatggtttctagggcttcacactggtcctcatgcccaccagccaaatcttgctgaaagctgcctcacccgccctgcccagtgctcccgatgcccaccttgtctcttcccactctgtccccgtgctgtgctctggcccctgactttcttcatgctgttccttccacctcaaatgcctctttcctctcccctaccatccccatttctcagccctcagggtcacatctgggccgcctgcctcggaacaacctggacagctccagggctcctggctttgtcctttcccttgttctgcgctctatgtgggcccagcacccaggggttcagaggttcgcatgctgaccatctgcctgggaattgctcctgatgcaggcaaatgcacaggcatgcaaacctctgaccccctgggcaccagccttgcagcagcgctggggatgcagactcgagggccaggtcgactctgctcttggggagctcccagtgtggaggaggaaggcactgccctgccttgaggaagccctggctggggtgtttctccagaggagcctccagttcagctgtgaagagaagtataaacagctactgccagtggatgcgaagtcgtctgggatgctagtgcttctcgggcactgcagacagtaaaccatcaatggtgcccagtttacctcctttgtctgcacacatgcagctagctccaggctcggttatgggggcaccaactaggggcaccaactatgcccctgtctctttgcagcattcagagtcctagtcactgacgattggagtgaggagtcatttccttgcaggcaaggccaggccacagttaccccatcccctcccagtgggcagtggggagcctggcaggtgggctgtatgcctgggtgggttgttgatgctctgcccacttctcagggccggaaggagccatactatatcacagagttgttccaggccgcagacaagaacaaggacaaccagatctgcttcgatgagttcctctacatcttgggcaagctggtgaaggactaccacctgcactaccaccagcagctgtgtgcccgctactgtgcccaacacagcctctactagagggagctcaggcagcctcctgcccaccggtgccggacccaggaggaggtgtgaccttgatatcaggagctgaatggagaacacagctgtgtgtgtctgtgtgtgtccctgtgtgtgtgtgcacatgtgtgtacatgtctgtggaaaggacatcaatgtgagagagaataaagcaatttcatacatatttccaaggatttgtcagtatatggttctgggcttcacctacaatccagaaaaagaagtttcggtcccaagctgggaaagatccattttagatcaacgaaatagcccttgcctccagggagcccctgtctgaggggaagaaacagcttctatctccagggagcccctttttgagggggagacacagctcctatctccagggagtccctgtctgaggaggagacacagcttattcctctagggagtttatattggatgggagagacaccacctctgattccagggggccctatctgatagggagacagtccccacccgcagtgttcagcctgagaaggaagagtctcctctcttggggagatagcgaggcctcgcttgtggtcactcactcacccaccacacaggtggtagcacaggggtgagggtaggggtgaactaacatgccgctccgacagcatccctgctctgaaagagagccccaagaatcagtgaacaagggtggggctgagcctgggaagagaccaggatcgggaggcaggtgcatttctagcagagggaacaacagtagaaaatcataaagtatgtctaggagcaacagaaattttgcttggaaattagtgttcatggagaaaacagtaggaagtcagcttgaatgggtgggttaggaccagagtctggaagtccctgaaaactgagcattggaatttggactttatccttttggtaagggatccttagttgttaagtgtggggaaggggcgagggccctgggaccagctctgtgctttaggaaactagtggtaggggtttggggtggaggaagacagatcagacctgcacagcctggctagaggctgtgacgaggaggtaaacagcttcatggggacggaagggagggaggcggcatcagaaaaggcagaacatcaaggtccagacctgggcgcagactgagggagaggaggatccagaatgaggtggaggtttcaggtgctggcgattggcatgggacctcggtgcctgggtgggagccagtctgcagggaatattgtgtgctgggtttgcacatgctgagtcagacactgacaggagctgagccaacaatccagcctggcagaaccacagacacatgttaagggaagagcaatgagtagaacctgggtgacagtcaacccaggaaggcttcctgagggagagaagggttgggtctgtttttttctacaacatgatgatggatgtgagggttactcctgacccagggctattcatgaaccactgatctgagtcctccggtatccctgaccccacccacctgagacctgtccctgcccttgctctgtttctttttccttttcctctcccctgggactctagggatctaatgcagaatcccttagggagggtctcctctgccttcaggaaatgccagagcccactttagagggttgtcttttctgagggttggtctgggaaccggtgtcctgagcttactgagatagaaatcatggattttgaaagagtgttggggggtgatataccacctgcgcacaggactgcagggtcacttaagaaacttggtctggttccctccccacctggtcctttgcgccaaacatggtggattgtccctggagctgagctggagaccttgtttctcatcagtcaggctctggggcagaatttgcccctgctgctccgggcctggcctgctgtccctcccacacttgccatcagcttagtttgcctttcaggacctagctgggccctccattccttgggagatgtctgcaccccattcccctttgcattctttcctgtggaagggcatcttctgccacactgtgcttgttttgtactctccgccgagacaggacctcagtgtccccataaacgctcagcaggtgtttggggaaggaatgcagaattggggcctgtggggctggaattgatgacctagatctgtgctccttcctgcaggcccctggctgtgtctagaggcatgaagaccatcgcctgagttactttggccactcttcttgcaggcccaggggagaaatacctgtctcacctgagaagtgctgggctccacaggcattgagtacgaagcaggggcacccagcctgagccctccctgccctctcctgcccccttctgggggtttcttcaccagctctgcctgctctgtcctcatttccttggcctcagggatggacctgtcaggtctgttgggacacacccagggactgagccctttcctgtaaacatgaccaggttccgctccctctaggttgccccatgtccgctaggctgcttacagcctctgcctttccccagatgtgcttacccaagtcctgataccttttgctgcaaggtcagttcagcctggctcctgctgtccccaaagcacccaaggctgtccaggggcgcagtttctggggagggggcgacatttcacgatcttgctggtcagcctgtacatgatgtgggaaggaggtcaccactcaggactccctcactggaccaggggaaggacctgaagtaatgccctgtgcctcagtttccccatctgtcaaatagggataattatacttgtaatgtccacatcactaggttgctgggaatatcaaatgagtcagtggatgcaaaatactttgaaaatatgatatggtgctttgaggcaggtgctgttatgctggtcacataggatagtacgtggtgaataataggtattaaccaagggtggatccttggttgaaaacttgtcatgtcagaaatggcgttgttttcctagatggagcttgattcatcttttgtcaaggaagtcagactgcatttgtttgatgaatttataccctgccttcttccagaaatgatttaagatggctgattgtgataaagagaatttctgccttggataagggaagggtcaaacttaattttgtattcatttatccctcaataagtattaattgaacatgtagtagctgccaggccctagggttgtgaaaagaaatgtgatttcttttctaaatggtctcctggtcccaaagaaaagacagacaataaacaagtgaatcataacatagcagggcaaatgctgtgatgggtaaggatttgggtagcatggaggagagaagaactaattctgccttgatggggtgagggcaggtggatcagggatggacttggagcagatgatgcctgagctggatcaggaatggtgaggaggacattacagggacaaaaggcattacaggcaggaataggaagtggatgctgtcacatcacatcatgagtcactcaatcatttgatacgctgaattactatgtctctctgtggggcttagtttcctcatctgtacaatgggcattataatagtacatacgtcattggattagtgtgagaattaaatgatcaatgcaaataaagcagcacttagaatagttcccggacatgggaaaagctcagtgagtgtgaactagtattttgtcatgatttgctctgatcagtgattgtggctgctgttattgtgtgtgctgggcactgtgctgggtccccaatggctcacatccagagagagctggatttattttggagggtgaaagactccctgctatgtttatgcaatggctcatgcccttgtgcaatgcagagggaccccaagcagcctccatctcccagggcacggtggatccccagcttcacagaacaggagagctgtggaggagtgtgggcagcagggtaggaatggatttagccctcggcaacaacacatgtccccacaaaacattttcttcatccattcatgtgttgagggacacttgggttgcttccaccttttggctcttgtaaataatgctgctatgaacatgaatgtacaaacatctgtttgaatccctgcattcaattcttttgcatatatacccaggagcagaatgatggatcatatggtaattctgtgtttatttatttgaggaacaaacttgccgttttccataacagctgcactattttacattcccactaacagtgcattaggcttccaattctctatgccctcaccaacacttgttttctgggttttaaaagaagtagtagtcatccttgtaggtgtcaggtggtatctcattgtcgttttgcttcatgttttcctaaagattagtaattttcatatgcttattgaccatttgtatatcttcttcggagaagtgtctatttgagtcttttccccaatttttgattggtttgtttgttttttgttgttgagttgtagggattcttttatattctggatattaatcccttatcagatatttgttttacaaatattttctttgtaacaacagaaacacaccacagtcttcaaggttggaagccagttaatctgagtagcattttgttagtggtggggagaggatttgttcctcctgaaatcctggggaattggccacctcctcttctcctcttaggcatgaagcgcgtctggcttctccaaagaactcttcccctccactacctcagagttagcttcctctcttcagccagtgatcctggggtcccagacacaataattaaccaagagagggtgaaaggctccctgctgtgtttatgcaatggctcaggcccttgtgaagtgccgagggaccccaagcagcctccatctcccagggcatggtccatccccagcttcacagaacaggaaagctgtggaggagtgtgggcagcagggtaggaatggatatagcccttggcaacaacacatttccccacaaagcacccacccaaaagaacaacaacgatagttttagtttttagtaatgagaacaatagttctcatgactaaaagccatcagccaggacacgtgttctcaacccttttgcggtctttggaccctttgaaactctgacagaagccatggaggaatgttctcactgagtgcatgcactcaaaatgatgcattcaacttcaattcagtttcagggatgtatggcctgaccaccaatgcaggggattagcaatcgcaatagtggagagggcatgggagtgggaatctggctggatcaagcaagtggatgccagcagcccagaaaaagagcccccctacctgctttttccttctgggcactattgcccagcaaatgccttcctctttccgcttctcctacctccccacccaaaattttcattctgcacagtgattgccacattcacctggttgagaaaccagagactgtagcaactctggcagggagaagctgtctctgatggcctgaagctgtgggcagctggccaagcctaaccgctataaaaaggagctgcctctcagccctgcatgtctcttgtcagctgtctttcagaagacctggtaagtgggactgtctgggttggccccgcactttgggcttctcttggggagggtcagggaagtggagcagccttcctgagagaggagagagaaagctcagggaggtctggagcaaagatactcctggaggtggggagtgaggcagggataaggaaggagagtatcctccagcaccttccagtgggtaagggcacattgtctcctaggctggacttttcttgagcagagggtggggtggtaaggaaagtctacgggccccgtgtgtgtgcacatgtctctgtgtgaatggacccttccccttcccacacgtgtatccctatcatcccacccttcccaccagagccatagccatctgctggtttggttatttggagagtgcaggccaggacaaggccatcgcttggggcatgaatcctctgcgtactgccctggccagatgcaaattccctgccatgggattccccagaaggttctgtttttcaggtggggcaagtccgtgggcatcatgttgaccgagctggagaaagccttgaactctatcatcgacgtctaccacaagtactccctgataaaggggaatttccatgccgtctacagggatgacctgaagaaattgctagagaccgagtgtcctcagtatatcagggtgaggaggggctgggtgtggcgggggctctctgcctggtcctggggctgccctgggccagcggtcctccctgccacccttcatagatggctatgcctcggctctctctgagatctttaaactctggcttcttcctcctcaatcttgacagaaaaagggtgcagacgtctggttcaaagagttggatatcaacactgatggtgcagttaacttccaggagttcctcattctggtgataaagatgggcgtggcagcccacaaaaaaagccatgaagaaagccacaaagagtagctgagttactgggcccagaggctgggcccctggacatgtacctgcagaataataaagtcatcaatacctca

SEQ ID NO: 13 - DNA, 146268 bp, Homo sapiens
ccggagcccgagccgaagggcgagccgcaaacgctaagtcgctggccattggtggacatggcgcaggcgcgtttgctccgacgggccgaatgttttggggcagtgttttgagcgcggagaccgcgtgatactggatgcgcatgggcataccgtgctctgcggctgcttggcgttgcttcttcctccagaagtgggcgctgggcagtcacgcagggtttgaaccggaagcgggagtaggtagctgcgtggctaacggagaaaagaagccgtggccgcgggaggaggcgagaggagtcgggatctgcgctgcagccaccgccgcggttgatactactttgaccttccgagtgcagtggtaggggcgcggaggcaacgcagcggcttctgcgctgggaaattcagtcgtgtgcgacccagtctgtcctctccccagaccgccaatctcatgcacccctccagagtggcccttgactcctccctctcctcactccatctttcctggcctctctccgggtgcttagcggacttggccaataacctcctccttttaaacgccctgaattgaaccctgcctcctgcgcatcctctttttgtgtcaccttagggttcagatttaactacgcgacttgactagtcatcttttgatctctctctcgtatttagtacttttagtcagcgagcatttattgatatttcaacttcagcctcgcggttaagagcttgggctctggaatcatacggctggaattggaattctgtcagtcgtgtggccgctctctactgtcttgtgaagataagtgagataatcttgacctgtggtgagcactcgtgagcgttagctgctgtatttaccaggtacagataagacaactacagtggatgataatgtatgtggtgataggggagtactctgatggtagaggagtgactttggttctctgcaaactcagcctgagactatcaattcagtttgtggtgagacctcgcagtgttaccttggcagatggtagaagccttccagatggaaggaaaaatgcgtgtaaaggcacaaagtgtagaaggaccctgaagctccagcgtgaggcctggcattgaatgaaatatattttgtgggttttcagctgctgaagtcataggaatggatgagaccaagaaaacaaagctgtttttgaggtatgagcggaagaagagatatcaggagactttcgaaacagtcataacggaagttaatatgatcattgctaacatttgctgtgtttcaggcactgtaagcatgtatatgggtccttaaagggactcatagaggtaggtactagtattgtttttccttttatcattgagaaactgaggtttgaagagattagtgaacttgctctagattatacagtttgtaagtggctgaaccaggatttgaactaatacaatctgactacagaggccacactccttagcactagaaaagaatggcatgccaagggcagagttatttctaggaagatgggatataagcgtcattgtcaagttgtgcaaaggggtcaacttggttgagatctaaaaaggaacactgaattcgtcaattcagaggctcgtaggaagtaggaaatccttatcttttcgtttgaaccttgagtggaacctagatattctggattaatgtataaatgaagttcatctttatatggtgacactcatactctagttgactacctaatagttcctctgccttctttcagttccgccaacatactgtgttctttaacattgtagaaccctttggctatgctagtctccttccctgaagtgttggtcctctagccctttttttgattggcaccagttagttcagatcttggctttattataaactcctctgagatatatgttccctgacagtttatctaaaatgattctctctacagttattttctattactgtgtttttgtttcctcagaggcatacatcacaatttggaattatgcattggtttatcaatttacttgtttattgtcaccctgctgcccagatatgacttcatgagggtaggatttgtatctgtttagttcattatttgtctagctataagtagtaaatattgtttgcatctatcagtgaatgagcatcttctgtttatgtagataatactgaactgttttgttttcttcaaagtaatcattaagctgaaggtaagaaaaacaagttcaaggaagtcacaccatggggaaaaaaaagtcaagtttagggctgcctcttccgggaagtgtcaaatctttagtatatttaggaataaaggtgccaaaccttatggttctttggatattgctaaggtattttcattggttagattaccagtttcattttccttattgactcaagagggctttaaactgagattgaagaagtaagaagattcctagataaaaccataaggaatggaaaaacaaaaatgataatacttgtccacaggaagtatataatcaaatgaaaagaactcaaataacaatctgtaatctatagcagagtaaagcggaagttgtaatagtgttgggggatgggggaagtcagaagaaccaccagtgaatataaaaggagaagagaatcagagccatctgctaataaaatgggtagtcagctctttttgttttttttgtcttgttttgttttgagacagtctcgctctgtcgcccatgctggagtgcaattgcgtgatctcagctaactgcactttccgcctcctgggttcaagtgagtctcctacctcagtctccccagtagctaggattgcaggcacatgctaccacacctggttaatttttgtatttttagtagagacggggtttcacgatgttggccaggctggctggtctcgaactcctgacctcgtggaacgcccacctcggcctcccagagtgctgggattacaggcatgagccaccacgcctagccccggtagtcagctcttactgagaatattcaaagacagggcattcattttgtaagagacattccttccttcataggaagattggacctggtcttttagttcctcccaattttgagattctgtgagattgaatcggggcagagaaacatacttaatcttgaaagattaagtagaatttagatggatggataggagaaggactttccctacctttttacttcttgagatatagttatttgtaggtataatatacataaatatatgtattttttctctgtttacagacattcatagtttaataaaaaacttctttgtattatataaaggtttagatcagaactagtaaaacagaatgctgtttctttttttttcttttctattttactttaggttctgtgggtagatgtgcgggtttgttacatgggtaaattgcatgttgctgaggcttggtgtacgaatgatcctgtcactcaggtagtgagcatagtacctgataggtagcccttcaagccatacctccctttctttccaaccctcaaacagtccccagtctctgttcttcccatctttgtgtccatgttgaaatgctgttcttactacatttttttgaaggacatcaaaagagagtttgattatatcagaagcccccaaaagaagagagctactcagtggaatcaaggcatagtaaaatatagttgatccttgatatttgcaaaggataccaccatagcatagaatttgcttcatttccttttaaaacagaaatgtcattttactcctattgttatgtgttaaataagaaccttaataccagttgagatggaagtggtagacaaagcttactagctctgataacctcctacttatcagctccaaagcatgttttaagcctttggctcagcaaaatgacatgtctctccatataagcaagagtgcttttttttttttctttgagacggagtcttgctctgtcaccaggctggagtgcagtggcgcgatctccgctcactgcaacctctgcctcctgggttcaagcgattctcctacctcagcctcctgagtagctgggactacaagagcacactaccacgcctggccaagagtgcttttaaatagttcattgtcaatgttaaatccttgagtgctcatttccttatttacctggctgttttctattcatctttcatgtctcaatttaaatgtcatgtttctttggtctcagagtaataaaaagtaaatatacttcccccatctcccgccccgcagagccttcctctgttgcccaggctggagtacagtggctcgatcttggctcactgaaagctctgcctcccagattcaagcgattctcctgcctcagcctcctgagtagctgggattacaggcgcgcgccaccaagcccggctaatttttgtatttttagtagagacagggtttcaccatgttggtcaggctggtcgaactcctgaccttgtgatcctcccaccttggcctcccaaagtgctgggattacaggcgtgagccactgcgtccagtgtaaattatacttttattttaatcctgctactactgcaagcaaggcaaacatttttgtgttacagcattacttgtatagattttaagaaaatctcattttaaatacggaaatgttaagaaaaattattgtgcctttgaccagaatgtgcctctaattgtacagttaaatctaactataaatactgcagtataaaataattatatacacattttttcacacctctttctctctatatatgcatatatacatatacatatatatacctatatgtattttttttacagacagtgatgtgtgttctgaaattgtgaaccatgagtctagtacttaatgatctgcttatctgctgccgtcaactagaacatgatagagctacagaacgaaaggtagtaaattacttaaattcaatttttccttgaaataagtgtgattagtaacccattattatttcctttttattttcagaaagaagttgagaaatttaagcgcctgattcgagatcctgaaacaattaaacatctagatcggcattcagattccaaacaaggaaaatatttgaattgggatgctgtttttaggtattctattcaaatttattttactgtctttatttttctctttcatatttatttctgttgtgatattacttttgtgtgtaagtcttaacatttatctttgcttcctatatatcattatgccttgcatatgaatttggcatttaatatttatccaaaacataatttttaaaggttgttcatatagaaacttaaaaattataaattatttcttcaataaaatgttttagacatatctcactcaaaattgagagagaatttctttcattttagttagttcacaagacttcagattagaggaaaaaattataataaatgttaggatattattttcacacctttaaatattactctgattataagtaaatgctgtgtgttaaattgtaataaaacaagtaaaaggaagattggaatacttgtgtatgaatttggttaaaaacaaaaaatacctcgaacaatgaaaaaacacaactgattgctggacaggagtggcaaacagggttgatgcatttttacattgagacatcattttcaaccgtgaaatccatttataactagaaacagattgtaaggattaggaaagatgaataaagtattttaaatactgagagtattaaataaactagaaataacatttgtagtcaagaggaagtgtgtatttagttgtccttcagtgtttatgacagattctgttttatttttagctcctgtttggtattagattgactgttacagatttgaaagcatataaaatgaaacatgcatgctgtttttcctctgattttctagtttattttaaataccacaaatataattacaacctgaagatgaatactattttgtataagctgatctggtaggtcaaatatgcacccagcattcctggctagttatgaatatcttctaggcaggcttaatttattggctggcaacattaccaactgcctaagaaacaggtagatcctgtacagaataacagaaggagttgagagaggattgagagggtccttactagcattgtaagcttttaatgacaaatttagaaaacaggcagtaaagcaatagaaagtcatagaagattaagagctttgcagaccagatattaaattggtcttgtaggagttaggccttgaaagagagatttaattgttttatttgtttttttcagctgatgtagtaatctaagcaaggtggtttaaaagttgctctttgtgatggcatgaacagcttttgaaattattataatttaagtattcaacgagtttctgaaattgcattttgttttcttgaagatttttacagaaatatattcagaaagaaacagaatgtctgagaatagcaaaaccaaatgtatcagcctcaacacaagcctccaggcagaaaaagatgcaggaaatcagtagtttggtcaaatacttcatcaaatgtgcaaacagaagtaagtgatgttataaattataaataaatggcttaacagattactgtcgcgtgagttttttttttttttcagatcattttaaggacttaactgttgcataagtttgttctaaatagaataagataaaagttgagtgtaagtacatataatgatttttatttttattaaaaggtttttttttagggctagtcaagtgaagcagtgggagtttagaaggaacaaagaaatctgtaactggttgtgatcaattcgttgtaaacaccactgcactcaggccagcctgatttttaatattacaagttcaaatatttggggaaatttatgcaagcatagaatgacagaaatctgaggattgaagggatttatttatttaagagatagggtgtcactctgtcacccaggctggagtgcaatggtgtgatgatagctcactgcaggctgaagcttctctgttcctaagtgatcctcctgtcttggcttcctagtagctaggactacagaagtgcatcaccatgccaggctgatttttttttttttttttaagaggtgttatttcactgttctgcccaggctgatcttgaactcctggcctcaagcagtcctccccctgctcagcctccctagttattggtattacagatgtgagccaccatgcccagtgaaggaattaaaaattactgtttaaactacccagtcttggatgccctctctacgtccctagcctttaggtagaagtgcagtcttcatgattgaatatactttcaaggctttcttttccatctttgaatagcattaacagtattaaaaactggccaggcgcagtggctcattcctgtaatcccagcactttgggaggccaaggcaggcagatcacctgaggtcaggagatcgagaccagcctgaccaacatggcaaaaccccgtctctactaaaaatacaaaaattaattgggcattgtggcgcacgcttgtaattccagctacttgggaggctgaggcactagaattgcttgaacccaggaggcagaggttgtggtgagctgagattacgccactacactccatcctgggcgacagagcgagactgtcaaaaaaagaaaagtattaaaaacctgtcttttgttactgcttctcccttctgagagtatatcaaaaactcctatttatgtttttagtgtgacatccttagagatgtttgaaagtagccacaatatttcctaagtcctcatctctaaagttcataatctcactttcttcagctcacgtgacctaggttttatgctactctcctctgaatattcttcactttaattgtctgtcttaaagtgtgggcctctacttacagggaagaggccagaaaaacaaacaaaaaagtgtgggactcattttttttaatacaggctcttgctctgtagcccaggctggagtgcatgcagtggtgcaatcttggctcactgcagcctccgcctcccaggctcaggtgatcctcctgcctcagcctcccaagtagctgggactataggcatgggccaccatgtctggctaatttttgtatttttaatagagacagggtttcactgtgttggccaggctagtctcaaactcctgacctcaagtgattttcccgccttggcctcctgaaatgctgggattacaagcgtgagccactgcacctggccaggactcaatcttttaggtatattctgattagtacagagtgaagcaattcttgcttatctttcattctgtactcttactgattaattctaagatcatgtgagcttccttggctgtcagaaccaacacttaactgacattttacttgctatgatttgaggaaaaaaacaacccccaaaaatatttttttctcctgatgagccaaatagttcccatctttaacttgtacaattaatattgtgaagagttgatttttcggaaccaaaatgcaggatcctggcaagcttttgtaaggaaatgggctttacacatactgaaaagctagaggcagaagtgtgtgttcagggactcctgggctcttcacagataaggatgttgctttgtgataccaactcttaatttaagaatcaggagtgtgaggcgcggttgctcacacctgtaatcccagcactttgggaagctgaggcgggcagatcacctgaggtcaggagttcgagaccagcctggccaatatagcgaaaccccatctctactaaaagtacaaaaaatagctgggtgtggtggcgggtgcctgtaatcccagcttctcgagaagctgaggcaggagaattgcttgaacctggaaggtggaggttgcagtgagctgagattgtgccattgcactccagcctgggcaacaagagtgaaactctgtctcaaaaaaaaaaaaaaaaaaaaaaagaatcaggaaagcccccaaattggtaaatatttagtagaagtatgcagattattagtgaatatttcagattggtggtatgagacttgagtccaaagaataatggtttagtcaattttctacctcctctgagatgcgagttcgtgtggatagcttcaaccccttgtcagagactccagcagagacaaaggaaaactacaccaaaatattctgcactcacttttgctctgtgtagtagctttgtatccagtaaaatattttatttgctaataatgctgggatatagtaggtacttactgaaagagtgaatgagagaaagataacatgtcaattttgtagcccaccagaaaagtttgcaatgtgtacagtagttttgccttgcagtgaacaaaccttttaattgcaacattaacaatggagattacgtttgaaaatgcatcagcctgttggtttataagaaatagttggtgaaattatcaatgctggtcatgtaagtagttgaaaatttgtttttttatttacggcttccttttctttcaaatttgactttgttacttaaacctttttaatattggggcaaaaccagggagttactattccctcaccccacttcagttgtttttgtttgtttgtttgtttgttttttacgaaaagattggagggttgatggaaatttaacatatgtctaaactttgccattcttgcttagcattggtatccaaggtatgatgaaagaaatagagattagtaaaaaagaagtaaaaggcagctgagaagaaacaagtaagcaaatattgttgatttctctccttttttttttttttttttttttttttttttgagacagagtcttgctttgttgcctaagctggagtgcagtggtgcagtcttggctcactgcagcctcttcttcctgggcgcaagcgattctcacgtgtcagcctctagagtagctgggactataggcacacgccgccaggcccggttaatttttgtatttttagtagagacgagggttttgccatgttggccaggctggtctcaaactcctggcctcaagtgatctgcctgcctctgccttccaatatgctgggattataggtgtgagccaccacactcacacacccagcctactgttcatttcttttctttttttttttttgagacagagttttgctcttgttgctcaggctagagtgcaatggcgccatcttggctcactgcaacctccgcctcccgggctcaagcgattctcccgcctcagcttcccaagtaactgggattacaggcatgccccaccatgcccagctaattttgtatttttagtagagacggggtttcaccacattggtcaggcttgtctcgaactcctgacctcaagtgatccacctgccttgtcatcccaaactgctgggtttataggcgtgagccactgtgcccaccctgttcatttctttatgttagcatttgtctgcttttgtacaaagcttaaatagagtctagatagtgcaaaactcagctgcgaaaaatgttaagttccataagattcctgaaagtctctgtaagtaggctgggcacagtggctcatgcctctctaatcctagtactttgtgaggccaaggcaggcagattgcttgagcacaggattttgagaccagcctgggtaacatggtgagacctcatctctacaaaaacacaaaaattagccaggtgtggtggtgaccacctgtagtcccagctacttaggaggcttagggaggaagattgcttgagcccagggggcagtggttgcagtgagccacgatcatgctattgcactccagtctgggtgacagagtgagatcctgtgtccaaaaaaaaaaaaaaaaaaaaagtctctgcaggcaacttagttgtacttttaagaaagatttgatcccagaagtttgagaccaacctgggcaacatagggagaccccatctttaaaaaaactaaaaaaattagctgagtgtagtggtgcttgcctgtagtcctagctacctgggaggctgacatgggtagatcccttaagtccaggaggtcaaggctgcagtgagtcataatggggccactgcactccagcttgggtgacagagcgagatattctgtctcaaaaacaagcaaaactatgaaaaaaaagtcaacatttcttgaaatacttctcatatttggtagaggagggagatatattgggataaaggacataggaagataggattttattataatattaatttctgtagttattcaacacaaattaatttttattgagcatttgctattagggcagtcactgggcttttacgtcagaatatagagattaattcctttccttaaggatctaatcatacaatggatgttttagattagaaaaatgttacaaggactataagagaaatgcacagggtactagaaaaaaggatcacatggttgtgcatttcataactggacaatgcctaaaattatgaagtgagccataagtgaagatgattttgcagttatatcagtgtatatttgtttaccatagcctgtgaatataactagtttcatcataggaaaaccctaatccagaatatattcatatttacatgagttgtgttctgctcatagttatggcaataaatatattcaattttaagattgtcagtatggaaaaatggcatttctgctgtgacgtaaatataatttactgaaaatgataattaaattatttttaaatgtaattttgttaccttcaagaatatgtgtgtagtcatgccaagttttcagaatctctagtaagtaaataacatgctgttaaaaatgacacaggtacaggggtcaagcacagtggctcatacctatagtctcagcactttgggaggccaagacaggagaatcccttgagctcaggagttcaagaccagcctggggaacattgtgagagattctgtctctatgaaaaatttaaaaaattagctgggcatggtggcacaacatctatagtcccagttgctcaggaggctaaggtgggaggatcccttgagcctgagaggttgaggctgctgttgggtgtgatcatgccactgcacaccagcctgggtgatagagcgagaccctgtcttaaaaaaaaaaattacaacctgaggtgtttgtatgccataaatgctattataggacttagaactaattttgctttccaaggtaaatattctccttgtaatcttatgttattctaataaattcattcttcataaagagtgccaaaaaacttgggatcatttttggtctaacaccagaaattgtgaattattaaggttataattgtttaagaatgattgcttttcgagatgagcagatcacttgaggtcaggagttcaagaccagcctggtcaacatggtgaaaccctgtctctactaaaagtagaaaaattagcagggtgtggtggtgcacgcctctagtctcagctacttggaggctgaggtgggagaattacttgaacccaggaggtggaggctgcagtgtgctgagtttgtgccactgcactccagcctgggtgacagaccaagattccatctcaaaaaaaaaaaaaaaagaatgattgtttttgctatatattcctataaaagaggcgttggcaaacttactgtgtaaagaggccagatagtaaatgttcttgactttataggccatgtggtcacctctgtcttaattacaaaagcagccataaacaataagtaaatgaatggttgtgactatgttccaataaaatgttatttgcaaagaaaaaaaaaatgaattttgcttggggccataatttgccaatttcttctctacaaaagaagtttagttaatagtaatttcccaaatggaattatttaaatagttgccattccaagtgtcttatttttgttcaaatttatgtttttctttatttgtttattttgaaataggagcacctaggctaaaatgtcaagaactcttaaattatatcatggatacagtgaaagattcatctaatggtgctatttacggagctgattgtagcaacatactactcaaagacattctttctgtgagaaaatactggtgtgaaatatctcagcaacagtggttaggtatgttttgaaggttgttgtttgtgaatttttcctcatgaaatgaaacttcaccaaagaaagcactctgtctgtatctgtctatatcccccaagtgacctgacagtttaacagtactttagtaaaattatatggttatcgaactgacccttaatttttatttattatgtagcttttgaataaagtcatgaataatatatcaggtgcctgatatcagagccggaattacagttgaaaaataccatctccatcgtcaaggagttgacagtggcagaagaaaacccaagtaaaccagagttcataatgtgctgtgatacagacatatttgggttcagtaggtatacaaaacaatgacacctaaactcaaccatgatttaagtagaaagggagaaaaccaagagagggaagtaccataaaagtgaaagcaggcagggtgcagtggctcacgcctgtaatcctagcactttgggaggccaaggccggtggattgcttgagctcaggagttcaagaccagcctgggcaacatggtgaaactctgtctttaaaaaaatagcggaggtaatggctcttgcttgtagtcccagttacttgggaggctgaggcaggaggatcacctgagccctggaggttaaggctgcagtgagctgtgatcacactgcactccggcctccatgacagagtgagaccctgtttccatttaaaaaaaaaaaaaaaagtgaaagcaagagagttgaaagttcaaaggggcgtggccaacattttaagtgttgtagaaaggataagacacaaaagtatccattggatgaggcagttagcacgctacttctaaggtaatggaaatcaaatatattagaatagaatgcattagaagacaatgtacagaacccagtgattcattagatgtgtagagtgtgtgctagggaggaatctggtgttgtttcctgtttatagctgggaggtactgagagaccacaaaggaaggaagttatggtcagagattgaaatacttcagtttgttggtttcaaagatggagcatttctgggtttgagaataagtgaaagtaggatttgacattaacaagatgattttaagtcaggtgtcaaagtcttctaatacacgaactctaaaagtttagaagcttttttttttcatggaaagtatttaagctaaattttgctagctaaattaaaagacatttgtccatattctttattgccattttattatttcaaaatgagatacatgtgaaccacaaaactactacctaatcagtaccctcactcctgcattacactctactgttcccctgagaataaatgccttctcagctaatttcttaggagtcatttgtagcctttacgttactctgaacacaagataggctgtgtctgtaacagggccctcaacaagcctagagacagcctttgggaataggctggtgatatctaggttacctaaccagatctttccccagtatggctggtcatatttaggtcattttacattatcacttacaaccatggctgtcactgaaacaaaggcagtctttcccctagtctgcttactatattctgtcatctagtttgttctctgaaaccccctttttatttttaaactaactactcttacttctttttttttcttttttctttttatttaagctaacctttgccacttcttcccggatgttacttcttataattagcttttttgtcaaagtatttttttacttagcttccttttaaaacttgcttagatgaggactctgtggaagaagcgaagtctgtgctcaaaatatatatttggtacaggtggtgactgaagccatgactatggatgagatttgtatatagagtttagtgtgagatgagaagaatggcctaagattgagtcagcatttgcatataaattttggaatcagcttactgatttctacaaaagatcttgctgggattttgatactaattgcattgaatctgttgcacaatttgagaagaatagaaatcttaacaatgtggagttttccaatccatgaacactgtatatctctccatttacttaggtttttttttttttttttttttttttgcttctttgtttgtttttttgagacagagtctccctctgttgcccaggctggagtgcagtggcacgatctcacctcactgcaacctccacctcctaggttcaagcgattctcctgcctcagcctcctgagtagctgggattacaggcatgtgccaccacacccagctaatttttgtatttttagtagagacagggtttcctcatgttggccaggctggtctcgaattcctgacctcaggtgatccacctgcctcagcctcccaaagtgctgggtttatagacttgagccaccgcgtctggccacttgtcttttttgatttctttcattagtgttttataattgtcagcatatagattttttgttgtaaattgacaattttttttctttaattttatatattaaaaaaaatagagacaggatctcactgtgttgcctaggctggtctcaaactcctgggctcaagtgatacccttcccttgacctcccaaagtgttgggattataggcatgagccaacatgcccagctgcaaattgacatttatttataattgtataaacataaagattttgtatatgttttgttagatttatactgcagtagtttgtaattgcattgtttttaacattttgattttcaaattgttcaatgcacaaaaattatacagaagtccagttaatttttgtatagtgaccttgtattttgggaccttgctaaaatcacttactaaatctagtagctttctttgaatgttcttttggattttctttgtagacaaacatgtcttctgtaagcagtaatttttttttctttctttctgagccatgtggcttttattttatttttgtgctttattacattggctaggacctccagtgtgatttattgtggtaaaatatatataacatttataattttaacttttttaagtgtacagttgtgtagtattaagtgcattcatattgttgtgtaatcatctccaccatccatctccagaacttttttttctatactcagtaaacaatgatttaccattttcccctcccctatcccctggcagctaccattctactttctctctctatgaatttggctatttggggtacttcatttttatggattgaatgttgtgtcccaccaattatgttgaaatctaactcccaaagggatggtatttggaggtgtgggatttaggaggtaattaggtcctgtgggtccagccttcatggatgggattaatgcccttatgaaaagaggccagagagctaacttgctgtctttctgccatgtgaagatacagttcaaagtcagtagtctgcagccccaaagagggccctcaccagaaacccacaatgctggcacctgagctgctttcagcctccaaaattgagagaaataaatttctgtggtttctaagccacctaacctataatactttgttatagcagcctgaagtagaggactcctataagtatttgtccttttgcaacctgcttattacacttaccaaaatgtctttgaggctcatcagtgttacagcttttgtcagaatttcacccttattaaaaactgaacactattctgttctgtgtatatgccacattttgttaattcattcgtccattggtggacatgggttgtttctaccttctgattattgtgaataatgctgccgtgaacatgagtatacatctcctgagtttcctgctttcagtcttttgattatatacccagaagtagaattgctagatcatgtggtaattctatatttaattttttaaggaaccaacatcctgttttacacaggagctacgccattttacattctcaccagcagcccacaagggttccagtttctctacattctcactagcacaactaatagaaaatgaggattcctcttctaggccttgaaagtgctgcataattttgcttcttcctacctgtctaacttaactaaagcgcttctaatttctgtgctcaagctacactgtcaattattcagtttctcaaacctagtggtttccatttttttaaattgacttttatcttttagaggaattttaaatttacagcaaaacggagtggaaagtccactggacacacacagcatgccctactgtcaacatcttgcaccagtggtacatttgttaccatcagtaaacctatgctgggacacatcattattatccagagtccaaggttcacttttggtggtacatatgctatggattttgacaagtgttttgacatttttaaagatctttttctgtatctaatgagatggtcatatttttttttcctctgggagagaatggtaacaatttttcactattacagaatcatacagaatactttcactgtcagaaaaatcctctgtgcttcaccttttcatctcttccttcttgtaaactgtgggaaccatggatctttttgctatctccatggtttagccttttccagcatgtcatatacagttgtgcgtctcttaacaatgtggatatgttctgagaaatacatcattaggcaatttctttgttgcgtgaacgtcatagggtgtatttatacaaacttagatggtataacactacgcacctaagctatatggtattactgctcctgcactacaaacctgtgcagcatgttactatactgaatactgtaggcagctgtaacacaatggcaagtatttgtgtctctaaacatatataaacatagaggaggtacagtaaaagtatagtataaaggataaaacatggtacacctgtctagggcacttaaccatgaatggagcttgcaggactggaagttgctctgggtatgtaaatgtgtggtaatgtaaaggcctgggatactatatactactgtagaatttgtaaactcttattctgtaccaaatttaaaaatttatgtttttctttcttcaatactaaagtaacattagctactataacttttttactttataaactttaaaaatgtttaaactttttgactcttttgtaataacacttagcttaaaatacaaatgcattgtacagctgtacaaaaatattttttccttatatacttatagatgttttttcttttgttctataagctttttaaatgaaattattattactctattttttcctttaaacttttttgttgaaaacaaagacacaaacacacacatgagcttaggcctacataaggtcaggatcatcagtatcactgtcttctgtccctgcatcttgtccccctgggagatcttcagggacatgcacagagctttcatctcctatgataatggtgctttattctgaaatacctcctaaaggacctacctgagactgttttactgttttgttttgttttgttttttaagaagaagaaggaggaatatagtataaaatggtgataaaaagcatagtagagtaagtacataaacctaacattttaccagtaacttagtcatttattatcattatcaaggtttatgtactatacatgattgtatgtattatacttttatatgactggcagtgcagtgggttttttttacacaagtatcaccacaaatgcttgtgagtaatttcttgtgctatgacatcactaagtatttaaataggaatttttcagttctgatacaatcttacggtaccaccttttcatattgccatttgtcattgaatagaatgttgttatgtagtatgtgactgtggttggaatcataacagtatgtatcattttcagattgccttctttcatttagtaatatgcatttaaggttcctccatgtctttctctttctttctttctgtctttctttctttctttttttttttttttttttttttttgagatagggcctcactctgtcacccaggctggagtgtggtggtgagatcatggctctgcagcttcgacctcctgagctcaaatgatcctcccacccccttccaagtagctgtgaccacagacacaagccatcacaccctgctaatttttcatttttagtagagataaggtcttattatgttgcttatgccagcagcttgaactcagcctcccaaagtgttgggattacaggtgtgaaccaccgttctcagctcctcgatgtctttttatggcttgataggctgaagtgggaggatcacttgagcccaggagtccaaatctagcctgggcagtgtagtgagacttccgtctcttaaaaaaacaaaaaacaaaaaaaagaggaccaaagttactgatattagaaatgaaatgagatctaattgcagatcctatagatattcaaaggataataaggaaacactatgaacatctattaatttaaatgggccagttcctcaaaaccatacattatcaaaagtcatccaatataaaatagataatttgactagtcccataactattaggagaataaattgaatccataatttaaagcctttcataagacaaattgggaacaagataaggatgtgcactctcaccactccttttcaacattatgttggaggttctagccagggtagttagacaagaaaaataaaaggcatacagattggaaaggaagaaataacactcccctttgtagatgacatgattgtctatatataaagtcccaatatacacaagtataacattgtgaataatgttatttggggactgggcacagtggcttacacctgtcatctcagcactttcggaggctgaggcaggtggatcatctaaggtcagatgatggcttcctctaaaacaggacagatttacttgtagcctattgattataaaaagcttgaggtttctctgttataactcagtccactgttttcgcagtgtcaagtgtcccatttcaccttgcctttggtactggggaactgatgcaaaaatgaaggtagtctggctaccatcattactgggagaaataaactgtcctttttctcttatcaggaatctcaggtttcctgctagcacccaggaaactgtcatgctaatttgttaggttacaagtagataaaatctcagccaggcacagtggcttatgcgtgtaatcctagcactttgggaggccaaagcaggtggatcacttgagcccaggagttcaagaccagcctgggcaacatggtgaaatcctgtctctacctaaaataccaatcagttgggtgtggtggtgtgggcctctagacccagctacttgggaggctaaggtgggaggattacctgagtctgctgagattgaagctacagtgagccgtgatcttaccaccacacaccagtttgggtgacagagtaagactctacctcaaataaataagaaacaaaccaagcagagtaaaatttcatacccttcataggtctcaacacattttttgcatattattaatcaaacagtattattattttaaaaaactgtggaggccaggcccagtggctcatgcccataatcccagcactttgggagaccaaggtgggtagatcacttgaggccaggagtttgagaccagcctgaccaacacggtgaaaccccatctttactaacagtacaaaaattagccaggcatggttttgtgcgcctgtggtcccagctacttgggagactgaggcatgagaatcacttgaacccaggaggcagaggttgcagtgagccaagattgcaccattgcactccagcctggacgacagagcaagattctgtctcaaaaaacagaagaaagaaaaacccatggagcatgtactgtaagtgctttcttaggcctagatgatggaacagaggcttagagaagttaagtaatgtttctgcgacctggctcttaaactggtgctctcacagcagtttatagttattcctgtcttaaaggcattttatataagataaaattaaatactgatggagtacttttactatgttaaaaataaattagtgcagttttaaaatcctttttctgtatgggattatggaatatttaagttaaattgtaacatttaatacattttgatttttaaaaaatcatgactaataatttttttttttttttaagaattgttctctgtgtacttcaggctctatctgaaaccttcacaagatgttcatagagttttagtggctagaataattcatgctgttaccaaaggatgctgttctcagactgacggattaaattccaaatttttggactttttttccaaggctattcagtgtgcgaggtaatctaatctctttttcttttgttttgtattgaaatacttttgatcttgcaagaccatgttttagactcagtaactaaaaattctaccttaaaataaaacattgatccatcataacagaactagtggattcctaaagagacaaccaagtccaacactttctgaatatccaatatgcagaacactacgtgaagttttcaagggggagatgtgtcttgctgatgttctgttgaccaggaaagttaaatatcctctaagtcattgcatttcccccattttgaggatggttttaatataccgagaataaaataaaataggaaaatattttggaagtattactgttgtacattagtatggcagtactcaatgtataatgtgaaacattttataaatggtgttacaaatcagttttgtttatttttatacaatgttttagcaggagggagagctaacagaagtggtctcttaacaccaaataagaactaattttttgtcagtgtgaagtaatgctgtgatttttttttttaatgaatagttttgaaattaagactactgtttgaaaattagggttttgtttttttttctttcagcataccacttcataactgttcagtttgtacagtttgttccccctgttatacccagttgagcttgtttgtttcttcacagacaagaaaagagctcttcaggtctaaatcatatcttagcagctcttactatcttcctcaagactttggctgtcaactttcgaattcgagtgtgtgaattaggagatgaaattcttcccactttgctttatatttggactcaacataggcttaatgattctttaaaagaagtcattattgaattatttcaactgcaaatttatatccatcatccgaaaggagccaaaacccaagaaaaaggtataaaggaaatgtttactgttttgaatttgcttcttcattcaaacatagaagtctaagtataaaattagtgttctttaggaggatatgactttcctctggatttctctggttgataatgttacttagccatgagaatgtttttcatagagtttttagaatttgaagcagtggtagcagattctgttatgcctttctatttgttcaatacaatattaggtattatgggaaatacaaaaaaatctgagacattgttccctctaggagctacttatgcatcaatacttagatactaaggggtctgacacagactgtagggcaaaagaatttaaagaaagcaggatcttgtttatccacctattacttttattagaagataaaatacgtaaattggactaaaaccagtcagattattcagctcctgaggaagatacatacatattactttaataggaatttgaggcagaaacagggaaattgctgccttaagcctcatagttactctagggccctgtttgccctagagtatcacttgttaaggagaatcacttattctccttaattccttcatatatgtcctataccaagagagtattgcccagaaggtatagtgcttttctgtagttaggaactttattggctggaactggagtttcctcttgctctgtctatgattgcctttgggcttatactagcctttggaccaactcatcatggctagtatagtgactttcttaaaacagcataccacattgagtaatagcagctataatggaggaaatgtcttgtagccactttttttttttttttttttttgagacagagtctcactctgtcgcccaggctgaagtgcagtgacgcaatgttagctcactgcaacctccgcctcctgggttcaagcaattctcctgcctcagcgttctgattagctgggattacagatgcctggcaccatgcccagctaatttttgtattttaatagggatggggtctcaccatgttggccaagctggccttgagctcctgacctcaaaccatccacccgcctcagcctcccaaagtgctgagattacaggcatgagccactgtgcccggccgtgtagccactttttatcaaaagtagctgtgtatttgttttatgggctcttctaataagtatatctagataatatgtagcccatgaaactactataagtgaaagaatagtgacttttaatagtttttcatcttttactcacctcttatctccaggatgaagatcaggcttattaggaggtgatatgatatgtttagggatttagttaactgcatatttagggtgaatttaaaattggcaggatgatgaggatgccagaaaagctaatgtagtttcagactactttaatagattttgtagtaccttgtttgtgagaaataatagaccttttgtttcgcatactagtcaagccacagttggattaccatgttcaccagattttgtatagtcagcattttaagttgactggaatgtgtcttgggaaagatgactgaaatggtgagaagtctgaataatatgtcatttttacactagttgaaggaactcgtaatatttttctcttaggccagaaaaaggcatacggagaacttggtcctcatatgaaagagggaacatattaattgtatttgcctcaggtgggagaataaattggagaaagacagattttaggtcagaatatggaagaaatttataagaaacacagttatctaaatgtaaaatggacagttatgaaatagagtttgtcaaggatcttgtcagaagaggcattagtactgaatggaaggttggaccaggtgtcttctaacgctgatgcagcttgacagctgaataattttgtgggagctagcagtgtaaacagagtacatacataaaaattacattttaattttttggattacaggtgcttatgaatcaacaaaatggagaagtattttatacaacttatatgatctgctagtgaatgagataagtcatataggaagtagaggaaagtattcttcaggatttcgtaatattgccgtcaaagaaaatttgattgaattgatggcagatatctgtcaccaggtacagtaagtaggtcatgtcacatttagaaatttcctgttaattttttttttaaactgggcattttgggcttttaaaacctgtgttctcacaaaaagcctataaaatgactctgtacatgcaactattcctttcaaactatcagaaatatttggaattacccttttaacttaaaagttaatgcttttgcagatatttgaaaactaacaatgaactttttcattcttaaatgattgtctctaggaaataaggtgaccctaaccctaatgattcgattcgactcgactgtattctacaaagtgctgggattacaggcatgagccaccaagcccagtctgtttcttttttgcaattaagctagagttcacatagcataaaattcacgattttgagttgtacatttcagtggtttttagtatttttactatgttgtacaaccatcatcactaattctggaaactttttttattttatttttatttttttgagatggagtcttgctctgtcacccaggctggagtgcagtggcacaatctccgctcactgcaacctccctttcccgggttcaagtgattctcctgcatcagcctcccgagtagctgggactacaggtgcctgccaccacgcccagctaatttttgtttttttagtagagactgggtttcaccatattggccagcctagtctcagactcctgaccttgtgatcctcctgcatcggcctcccatagtgctgggattacaggcgtgagccaccgtgcccagcccagaacttttttatcatcccaaaagaaacctcatcccttcttagcattcagtcccaattccctgcatctcctagatcctggcaaccagccactaatcaatcttggtttttgtggattttcctgtttgggacagttcgtttaaatggaatcatacaatatgtgagtcttttgtgtctggtttctttcactaagcataatgttttcaaagttcatgttttaccatgaatcagtacttcattcatttttattgctgaataatattcagttgtatggatatactccattttacttacccatccatcacctgatggcctaatgtttcttaaataaaactctgttccccagagatttggttaacatcctgagtagtaatttcactctgtcaaatattttcttaatatttcttaaaatttcttaaatttaaaaacttgaatccctttgaaagtaaaggtttttgctttacttttagatttcttagtgcttttagtaaatgttcccaggaaataaaactaatgcattacttggtaatacctgctttctaaagtgccattactgtcatgcaaaatgtttgtttcttactatgttatcagatttatatgtttctgtaatgtattactcttgctttatgagttccctgtatcttcatttcagaaagaattttttttccccctaatgaaatattagaagacaatagcaatgaaaaaagtgtatttggccaggcgtggtggctcacacctgtaatcccagcactttgggaggccaaggcgggcagatcacctgaggttgggagttcaagaccagtctgaccaacatggagaaactctgtccctactaaaaatacaaagttagctgggcatggtggtgcaagcctgtaatcccagctactcgggaggctgaggcaggagaatcacttgaacctgggaggtagaggttgtggtgatacgagatcgtgctgttccactccaacctgggcaacaacagcgaaactctggctcaaaaaaaaaaaaaagaaaaaagtggatttatttttattttacaggtttttaatgaagataccagatccttggagatttctcaatcttacactactacacaaagagaatctagtgattacagtgtcccttgcaaaaggaagaaaatagaactaggctgggaagtaataaaagatcaccttcagaagtcacagaatgattttgatcttgtgccttggtaaagtgttaccattttctcattcagtgtcattttaatctcttgtatgttatttttcagaaaactttcagtggaatcctttcatctcaaccagaactaagtcatttgtctacccccaaacctattactagcaaagggatatgtgattgccatgacaaatgagatcaatcattaatggctcatttgcttgggccaagtgcagggccacctattttaatcatattgtcatagcaagttaagaaggaggactggctctctgataggcaattagaagtgtgcacctcatggaattcactgaattgtacgcttcaacaatagattttagcatacgtagcaccttctaatagaattaggaagaagttaaagataatcttaagaaatcacagaataattttgaccttatgccatgataaaaagttattttctcttattttctatcttctttattctcatgtaacgttcacatatatttaagtaatcaaataaattatggatactttggaatcccaaaatattagatctggtaaggatgtttagaatttatctagttcagcctgtttgctttactgaaaagaaactgaaacccagagaggttaagcaacttctgtagggacagagatttatagattatagtcaaactcgtgatcagtgctcttttgattaccatgttgatggaatgtttaagtgtaagtgacttctggggaaaagcatattgatttagatacctattgcttaagctcatttttatatagttaagagtagctatttaagattcttaatttgtccttttagtcaagagtaatttattgaacacctgttatgggctaagcgttagatatacagagatgaataacataagactcctattcttaagtatcacacattctagagaatacacagcaaatgtttattggattaactgaattaatgtaaaggaaaaacagttttttgggtttctttgttttcctgttttagaggaatcgtttggtgactaaagagcaaggatgtacaagataactcagaaataaaatattgctaaatatatatatatatatatatatattttctgagacggaggctcactctgtcacccaggctggagtgcagtggcacaatcttggctcactacaacctccacctcccaggttcaagcagttatcctgcctcagcgtcctgagtagctgggattccaggcatgtgccaccatgcccggctaatttttgtatttttagtagagactgggtttcaccatgttggccaggctggtctcaaactcctaacctcgtgatctgcctgccttggcctcccaaagtgctgggaaaccacctggcccaaatattgctaatttaatatcctttaaaatatttgtttaagggaaacttaacagcttacccagctagccaaacgttgacaattttcctgccaatttaggaagtaggacatagtaactattaacagccagtttatttttagagtactatggaaatgatggtgattctctaattaggatattgtaagagtaccatgtctatatatttccttttagtttgttaatgtgatggaatagttttcaaattatcctttttttttttttttaggctacagattgcaacccaattaatatcaaagtatcctgcaagtttacctaactgtgagctgtctccattactgatgatactatctcagcttctaccccaacagcgacatggggaacgtacaccatatgtgttacgatgccttacggaagttgcattgtgtcaagacaagaggtcaaacctagaaagctcacaaaagtcagatttattaaaactctggaataaaatttggtgtattacctttcgtggtataagttctgagcaaatacaagctgaaaactttggcttacttggagccataattcagggtagtttagttgaggttgacagagaattctggaagttatttactgggtcagcctgcagaccttcatggtaagttcagcatgcattatgtctgacttacagataaacacacacagacacacacacactcacatatccctgatcattttcatagtttgttacttcagttaaagatgtcaaattctatttcagatgcttttcttgtttggccgagaagacttaataaatgcataagtgaatttagtttcaaatgttgacaaattattaaagactaatgttaaggaatttcttttttagttaaaaaatttttaattgatctataatagagttatatattatcaaggtacatgtgataatttgacacactcatatgacacactcatgtagggtgatgggatatcagcaccctacgtatcttttcttcatgctaggaacgtttgaattattctcttcttgctgtttggaaatgtacaatagattaatgttaaccgtagtcaccctactgatgtatcggacaccaggtcttattccttctaattgtatacgtgtatccaaaagactttctttaaagaattatgaagagtttaaatttcttttatgtgcaatttatcattatttattaaatagccatgtttaaattgtagtactatgcactgttaataaacgagctattttttaatcaagaatcttcccaaatgtaatcagacttttaacagtttttatgttcatttagtcaccttaactaaatgtatgtgccaggcactgtcctgatagataaagtctttgcccctccaatagcttgcttttcacaattgtcctttgttttgttatagtcctgcagtatgctgtttgactttggcactgaccaccagtatagttccaggaacggtaaaaatgggaatagagcaaaatatgtgtgaagtaaatagaagcttttctttaaaggaatcaataatgaaatggctcttattctatcagttagagggtgacttagaaaatagcacagaagtgcctccaattcttcacaggtaatttaagttcattagcatgctgctgttttttttgtttgttttatcaggctctctccacttatttgatgccagatggctttattttataataataatgcagaatttcccagatctaaccttaattattaaatattatgtttgtttttacagttatctgtgtctttatgcctgattgcttctgaaataaagggttgtctcactgtgagaatatgggggatgtgcatgaaaaatgcacatataattctttgagcatttatgtgttcctttctgattttttaaataagtaagtccatatatttgagtcatgtagatcctggatcctttctcataatgggagtgtcttttgggtaaaagatgttttatgaatgaggtgaggaaacgaggaagacaaaacaggatgtaagcactaggataaaggaatggagtccctcgtccacttaacctttccacagattggtaattggaaccaaatgattggagagcagacctccgaatggatccaattaaagtacttttgctttaattttacaaccttttatttatttcagaaataatgttaaacatgctgtttctaaacagtattggaaatgataataacaatggttgtcctccttaaattgtccttttagatattaagaaatttagtatagatgaaagcaattttaatctaggatccaaattttagaagtcaagatttatagctaaacatggatgttaaagtttaaagtattctttacatggcttttggtcttctaagtgaagctttttgtttttctttgtagtaattttcctcatcttgtactggagaaaattcttgtgagtctcactatgaaaaactgtaaagctgcaatgaattttttccaaagcgtgccagaatggtatgttatctaataatgctctttatcattttaagctatagctttaattacaaagatgataattttagctgggtagtagctgcatcttaataattgtaaactaaattggtccaaaaaaattgcaactgttagccagggaagaggttgttttaattcagtgattgtaatctatgttatataacattagaccaagcttactattttttaatgctgtatagtataatatgtgacaagtgccaatgagaaaaactgaatggttatgctgggaaattaagaatataaaatttatatgaaataagttcttaaagatgttacccatttctgtacatcaactatgatttgactatttgttagctttaaaaactaatgataattgaaaacaaaaataaatctaaacctgagtttagttgattgactcaagagacttagattgtattgctgtgactgaaaatgactcactggcacaaacattccttatctccctcaagagggcaaaaggatgcgtaactgcttacctataccagatgttaaaggtttttaaacctatgctctttacttcctctgcttggtgaaaaaagggatatgtttgcagacaatgttatgcttaacatttatatctggtgtttttaaaaatactttctgaatttgcctttgagattgtaacttgtattttttctctatctattagtaaaatttgctactgaataatgacatttgatataagtaggtctcaaagtccgaagaagagaagcatttaaaagaataatctattaattatataagtagtctttgaatgatgtagatactaggttaatgttttcctttgtaatatattgctaatacatataaggcaaagcattaggtacttggtttatatattaaagatcttactttcttgaagtgaacaccaccaaaaagataaagaagaactttcattctcagaagtagaagaactatttcttcagacaacttttgacaagatggactttttaaccattgtgagagaatgtggtatagaaaagcaccagtccagtattggcttctctgtccaccagaatctcaaggaatcactggatcgctgtcttctgggattatcagaacagcttctgaataattactcatctgaggtgagattttttaaaaaaagaactaagcttatatatgattcaactttggtaaactgttaggaaggagaaataggggcaggaaaaacagcaaggatggtgggaggcttcattttaaaagcaaagtggcagtaaagggctctaaattggacaacttagcataattaaaggaaaactcaagaataataatttgagtacttcctttgtactggaaattatggtagacataaaataattccttgtgtaggttagtgaggaatagtaagagtttgagcatagggattatatgatgaaaaaaacctctaaatacaaaggagggaaatgttacagtaatagaaaagaacacgatgtaaacaaatctaatagattttggtggcatctgaagagagatgagtgattagtaaagacaataaatggactagcaattattttagacgtcatctaggaatttcctttagcctcaaaatcacgagttctcttcatgtatactattctcttgccaaaacttgcattttttaaaatgtgaaatgtctttctacctatttctgtgtattcagatcatccacatgtgaaaatccttgctaacgcctttcttagaatctcagaaagtaagattctaagaatttttatttttgagacagagcctcgctctgttgcccaggctggagtgcagtgacgtgatcttggctcactgcaacctccgtcttccagttcaagcaattctcctgcctcagtcttccgagtagctgggacaggcgagtgctaccacgcccaggtaatttttgtatttttagtagagatggggttttgctatgttggccaggctggtcttaaactcctgacctcaggtgatggacccgcctcagcatcccgaagtgctaggattacaggcgtgagccacggtgcctggcctaataatttttcatcttttaatttcatagtacttaatgtttcacatttttaatggcagttagcatcttctttataccatggatatttacatatggtttgtatacaaatatctcttgaactataactcttaaacataaactcttaaaagggcatacatgtttttatttatctttatatcctccacagtgccttattacatggtaaatgattaaataaagcctacaatccattcaaaggagtgaattcggtagccagggaaaatgacttgaggacatgagaggggacagtgtgcctctttatgatctttactgacattcttctgcaccacaattgtaaccactttcattacaaagtaatttagttttgtatattttctcctaaaatgccgtttcctaccctgtaggaacaaaaaaaatctgaacattttgtgtgtaacttagcagattcttagtaattctataaaattgtctaaactttttttttttttttttttttgagatggagtcttgctctgttgcccaggctggagtgcagtggcctgatctcggctcattgcaaccttcgcctcctgggttcaagcaattttcctgcctcagcctcctgagtagctgagattataggtgcctgccatcacgccctgctaatatttgtatttttagtagagacaaggtttcaccacgttagccaggttggtctcgaactcctgacctcaggtgatctgcccgcctcggcctcccaaagtgttggggttgtaggcgtgagccaccatgcccggccagctgtcaaaacttgtatctactagaaaaaatgttttatgctattctgtggagtctaaaaagctgaataagtcaaggttcctattcttcagaagcttaaaatgtcattttaatgtctctttatatgactgtaatttctacttgtgttctaagacttacagtcatttatttgcctgtgaagctttttttcttttctttcatccctacctcaaatatttaagggcctatgtgtacagtacaccctccaccctaagatgatatatcctgcttggccatcaggagatacttaggctatttttcttgagaatcctggttataattctacagtgatctcctagttgtttttagagctatccaggatatgccacctttaactcagttaactgaacttttgttttttaatatgtatgtagaatttgttcttacaaaagatagagtatactaaattatttatgaaatatatatatttttatttgtggtttactttaagattacaaattcagaaactcttgtccggtgttcacgtcttttggtgggtgtccttggctgctactgttacatgggtgtaatagctgaagaggaagcatataagtcagaattattccagaaagccaaggtaggagaatttatactaataaagtttcggataaatttgaatgaaatgtattcctgtgaaaattattacatttgtttggaagacattaaattttatgcaggttaaccctttctcttttatttatgtaatgtgagaagaaattatactatgtattttttaaattgttttaattgtttaatttttaattattattatactttaagttctggggtacatgatgtagagcatgcaggtttgttacatagatatacagtgccatggtggtttgctgcacccatcaactcgtcatctgcattaggtacttctcctaatgttatccctcccctagcccccgaccccctgtcaggccctggtgtataatgttcccctccctgtgtccatgtgttctcattgttcagctgccacttatgagtgagaacatgcagtgtttgtttttctgttcttgtgttagtttgctgggaatgatggtttccagcttcatccatgtccctgcaaaggacatgaactcatccttttttatggctgcatagtatatcatggtgtatatgtgccacattatctttatccggtctatcattgatgggcatttgggttgcttccaagtttttgctgttgtgaacagtgctgcaataaacatacgtgtgcatgtgtctttatagtaaaatgatttataatcctttgtgtatatacccagtaatgggattgctgggtcaaatggtatttctagttctagatccttgaggaattgccacactgtcttccacaatgattgaactaatttacactcccaccaacagtgtaaaagcattcctgtttctccacatcctgtccagcatctgttgtttcctgactttttaatgataggctgtaagcatgaaactctttcttatctcttggtagtactctgtcactggtatgatttgcaagaacagagtataagatttgccattttaaaaaattgttaatgagttttgcttatactgtatgactacgtggaacttctaaaaacatttcattttttctcttaagtgcactttattttttattttatagtatgtccaagatcaaagtacactgtaaaaagcaatactaaactataattttaactggaatttgcatttttccttctattcacaatagtctctaatgcaatgtgcaggagaaagtatcactctgtttaaaaataagacaaatgaggaattcagaattggttccttgagaaatatgatgcagctatgtacacgttgcttgagcaactgtaccaaggtaagattttcttcttcttgttttgttttttgagataggatctttctctgtcacccaggctggagtgcagtgggattgtcacaactcattgtagccttgacctcctggtttccagcaattctcctgcctcagcctcccaagtaattgggactacaggcatgtaccacctagctaaaattttctttttacttgaaagtgtagcctatgcagggaattgatcactggttggtgttactgttttggtgtccactcgtaagtttattttttacttttatttttcttttttttgagacagtctctcactctttcacccagagtgagtgatcacatcactgcgatccagcagcctcgacctcctgggctcacagcagcctcgacctcctgggctcaagtgattctcccacctcagcctccttagtagctgggactacaagtgtacaccaccatgcctggctgatttttgtatttttgtaattttttgtattgatggggttttacacattgcccaggctagtctcaaaccctgggctcaagtgatgcttacatctcaaagtgctgtgattacaggtgtcagctaccatatctgttcacattcataagttatacaaattgatttaaaattcagttgaatggtacataaaggtaatatccagacaaataagcaataggaatctgagtttctcatgaaactaattttataatttcaggaatttttctgagattgccttatgacttttatatacaaccatatagatgactcttttattcctgggacactttcattcatttaataaaaattttttgacccaaactatgtggtatgcgtagcggggctagtgagcaacacaacaataactccagcacatagtttactttcttttgctcagatcaccttacataacatttggtagaaagagtgctactgtgtttaatctttgtttttatctgcagcagcctgtgggatagccaagccaggccccagagtattgataataattggaaatatatttcaaacctagtattaggtacatggccatatagcaatattatcaacatatttcttggttttgtaatgtgtttttcctcctttttggtgtaagtggggaaggagaaaagtagaataaactctaacctataattatagctcacttatctttagggtcaatagctgttactttaatgttgttaaagcacaatgaaagatgtacagtatagttattataactctaagaaaagatgtgtttttgaagcagcatatatattggccctaatagtaaactatttatctacattccattcaagatagagaaaacactgtctgccaagaataattgtttttatttctttgttgcttggttctttgtttgtcttaattgcagaagagtccaaataagattgcatctggctttttcctgcgattgttaacatcaaagctaatgaatgacattgcagatatttgtaaaagtttagtaagtatgcttcctgttttgctatcatattttgattctaataggcataatttttttgttgaaatatctttgtaaataaggatgcatctcacaacatatagctcttaacatttttacaaatgtggaaattaaggccaggtgcggtggctcatgcctgtaaccccagcactttgggaggccgaggtgggtggatcacaaggtcaggagattgagaccatcctggctaacacggtgaaaccccgtctctactaaaaatactaaaaattagccaggcgtggtgacatgtgcctgtagtcccagctactcgggaggctgaggcagaattgcttgaacctgggaggtggaggttgcagtgagcgaagatcgtgccactgcactccagcctaggcgacagagcgagactccatctcaaaaataaaaaaatttaaaaaattaaataaaatgtggaaattaaataatttgtcttgtggggaaatatacctgattgcttcttaatatcaatacctagcatagtagtgcctgcctttagtttctcaataaataatacatttaaaaattgggaacgaatcatccaggctcacagctatatctgcgcaacattgtaccaaaatttaaaataattatttgttctttaaaagtgaccaaaaatcttgccaggcaagcaacatattcttattgtagtatttatttttcttccatacaaatgggcttatgccacatacattcttttttctggaacactgccgggcatacaaagtagttattgaaatatctattgagtgaaaacatattctgtaacttatttccattttatgacacatcttaatcattttccatgtcactgtacttattttataagctatctgctgttatactttatttatttagcagtgcatggtattctattgtgtggtgatagtgaatagtatatatgtatatgaaagcttatctgctcttttttttttttttttttttttgagacaaagtcttgctctgttgcccgggctggagttcagtggcacaatctcggctcactgcagcccccacctcctaggttcaagagattctcctgcctcagcctcccaagaagctgggattacagatgtgtgccaccacaaccggctaatttttgtatttttagtagagaccaggtttcaccatgttggccaggctggtctagaattcctgacctcaaatgatctgtccaccttggcctcccaaagtgcttggattacaggtgtgagccaccacactgagccaaaaagcccatctgctcttaattaacattttaagtggtttctagttttttgggttacaaagacttctgtggtacagattattgtacttttgtctatttgtatttgtgtgtatgatggatgtaggataatttctagcagtagacttgcttgttcaaaaggaatgtgaattttactttttgatggatattgtcattgtcctccaaaatagtcataccaatttaggcattttcctacaccctctttgggtaacactttaggtgttacaaaacttcttaatataagaaataattttgagggaggagccaagatggccgaataggaacagctccggtctacagctcccagcgtgaacgacgcagaagacgggtgatttctgcatttccatctgaggtaccgggttcatctcactagggagtgccagacagtgggcgcaggtcagtgggtgtgcgcaccgtgcgcgagccgaagcagggcgaggcattgcctcactcaggaagtgcaaggggtcagggagttccctttctgagtcaaagaaaggggggacggacggcacctggaaaatcgggtcactccccgaatactgctcttttgcgacgggcttaaaaaacggcgcaccacgagattatatcccgcacctggctcggagggtcctacgcccacggagtctcgctgattgctagcacagcagtctgagatcaaactgcaaggcggcagcgaggctgggggagggatgcctgccattgcccaggcttgattaggtaaacaaagcagccgggaagctcgaactaggtggagcccaccacagctcaaggaggcctgcctgcctctgtaggctccacctctgggggcagggcacaaacaaaaagacagcagtaacctctgcagacttagatgtccctgtctgacagctttgaagagagcagtggttctcccagcacacagctggagatctgagaacgggcagactgcctcctcaagtgggtccctgaccctgacccccgaacagcctaactgggaggcaccccccagcaggggcacactgacacctcacatggcagggtactccaacaggcctgcagctgagggttttgtctgttagaaggaaaactaacaaacagaaaggacatccacaccaaaaacccatctgtacatcaccatcatcaaagaccaaaagtagataaaaccacaaagatggggaaaaaacagaacagaaaaactggaaactctaaaaagcagagcgcctctcctccaccaaaggaacgcagttcctcaccagcaacggaacaaagctggatggagaatgactttgacgagctgagagaagaaggcttcagacgatcaaattactctgagctacgggaggacattcaaaccaagggcaaagaagttgaaaactttgaaaaaaatttagaagaatgtataactagaataaccaatacagagaagtgcttaaaggagccgatggagctgaaaaccaacgctagagaactacgtgaagaatgcagaagcctcaggagccgatgcgatcaactggaagaaagggtatcagcgatggaagatgaaatgaatgaaatgaagcgagaagggaagtttagagaaaaaagaataaaaagaaatgagcaaagcctccaagaaatatgggactatgggaaaagaccaaatctacgtctgattggtgcacctgaaagtaacggggagaatggaaccaagttggaaaacactctgcaggatattatccaggagaacttccgcaatctagcaaggcaggccaacattcagattcaggaaatacagagaatgccacaaagatactcctcgagaagagcaactccaagacacataattgtcagattcaccaaagttgaaatgaaggaaaacatgttaagggcagccagagagaaaggtcgggttaccctgagagggaagcacatcagactaacagcggatctctccgcagaaactctacaagccagaagagagtgggggccaatattcaacattcttaaagaaaagaattttcaacccagaatttcatgtccatccaaactaagcttcataagtgaaggagaaataaaatactttacagacaagcaaatgctgagagattttgtcaccaccaggcctgccttacaagagctcctgaaggaagcattaaacatggaaaggaacaaccggtaccagccgctgcaaaatcatgccaaaatgtaaagaccattgagactaggaagaaactgcatcaactaatgagcaaaataaccagctaacatcataatgacaggatcaaattcacacataacaatgttaactttaaatgtaaatggactaaatgctccaattaaaagacacagactggcaaattggataaagagtcaagacccatcagtgtgctgtattcaggaaacccatctcacgtgcagagacacacataggctcaaaataaaaggatggaggaagatctaccaagcaaatggaaaacaaaaaaaggcaggggttgcaatcctagtctctgataaaacagactttaaaccaacaaagatcaaaagagacaaagaaggccattacataatggtaaagggatcaattcaacaagaagagctaactatcctaaatatatatgcacccactacaggagcacccagattcataaagcaagtcctgagtgacctacaaacagacttagactcccacacattaataatgggagacttttaacaccccactgtcaacattagacagatcaacgagacagaaagtcaacaagtatacccaggaattgaactcagctctgcaccaagcagacctaatagacatctacagaactctccaccccaaatcaacagaatatacatttttttcagcaccacaccacacctattccaaaattgaccacatactgggaagtaaagctctcctcagcaaatgtaaaagaacagaaattataacaaactatctctcagaccacagtgcaatcaaactagaactcaggattaagaatctcactcaaaaccactcaactacatggaaactgaacaacctgctcctgaatgactactgggtacataacgaaatgaaggcagaaataaagatgttctttgaaaccaccgagaacaaagacacaacataccagaatctctgggacgcattcaaagcagtgtgtagagggaaatttatagcactaaatgcccacaagagaaagcaggaaagatccaaaattgacaccctaacatcacaattaaaagaactagaaaagcaagagcaaacacattcaaaagctagcagaaggcaagaaataactaagagcagaactgaaggaaatagagacacaaaaaacccttcaaaaaattaatgaatccaggagctggttttttgaaaggatcaacaaaattgatagaccgctagcaagactaataaagaaaaaaagagagaagaatcaaatagacgcaataaaaaatgataaaggggatatcaccaccgatcccacagcaatacaaactaccatcagagaatactacaaacacctctacgcaaataaactagaaaatctagaagaaatggataaattcctggacacatacactctcccaagactaaaccaggaagaagttgaatctctgaatagaccaataacaggatcagaaattgtggcaataatcaatagcttaccaacaaaaaagagtccaggaccagatggattcacagccgaattctaccagaggtacaaggaggaactggtaccattccttctgaaactattccaatcaatagaaaaagagggaatcctccctaactcattttatgaggccagcatcatactgataccaaagccaggcagagacacaaccaaaaaagagaatgttagaccaatatccttgatgaacattgatgcaaaaatcctcaataaaatactggcaaactgaatccagcagcacatcaaaaagcctatccaccatgatcaagtgggcttcatccctgggatgccaggctggttcaatgtacacaaatcaataaatgtaatccagcatgtaaacagaaccaaagacaaaaaacacatgattatctcaatagatgcagaaaaggccttggacaaaattcaacaacccttcatgccaaaaactctgaataaattaggtattgatgggacgtatctcaaaataataagagctatctatgacagtcccacagccaatatcatactgaatgggcaaaaactggaagcattccctttgaaaactggcacaagacagggatgccctctctcaccactcctattcaacatagtgttggaagttctggccagggcaatcaggcaggagaaggaaataaagggtattcaattaggaaaagaggaagtcaaattgtccctgtttgcagacgacatgattgtatatctagaaaaccccactgtctcagcccaaaatctccttaagctgataagcaacttcagcaaagtctcaggatacaaaatcaatgtacaaaaatcacaagcattcttatacaccaacaacagacaaacagagagccaaatcatgagtgaactcccattcacaattgcttcaaagagaataaaatacctaggaatccaacttacaagggatgtgaaggacctcttcaaggagaactacaaaccactgctcaaggaaataaaagaggatacaaacaaatggaagaacattccatgctcatgggtaggaagaatcaatattgtgaaaatggccatactgcccaaggtaatttacagattcaatggcatccccatcaagctaccaatgactttcttcacagaattggaaaaaactactttaaagttcatatggaaccaaaaaagagcccgcatcggcaagtcaatcctaagccaaaagaacaaagctggaggcatcacactacctgacttcaaactatactacaaggctgcagtaaccaaaacagcatggtactggtaccaaaacagagatatagatcaatggaacagaacagagccctcagaaataacgctgcatatctacaactatctgctctttgacaaacctgagaaaaacaagcaatggggaaaggattccctatttaataaatggtgctgggaaaactggctagccatatgtagaaagctgaaactggatcccttccttacacctgatagaaaaatcaattcaagatggattaaagacttaaacattagacctaaaaccataaaaaccctagaagaaaacctaggcattaccattcaggacataggcatgggcaaggacttcatgtctaaaacaccaaaagcaatggcaacaaaagacagaattgacaaatgggatctaattaaactaaagagcttctgcacagcaaaagaaactaccatcagagtgaacaggcaacctacaaaatgggagaaaattttcgcaacctactcatctgacaaagggctaatatccagaatctacaatgaactcaaacaaatttacaagaaaaaaacaaacaaccccatcaaaaagtgggcgaaggacatgaacagacacttctcaaaagaagacatttatgcagccaaaaaacacatgaaaaaatgctcatcatcactggccatcagagaaatgcaaatcaaaaccacaatgagataccatctcacaccagttagaatggcagtcattaaaaagtcaggaaacaacaggtgctggagaggatgtggagaaataggaatccttttacactgttggtgggactgtaaactagttcaaccattgtggaagtcagtgtggtgattcctcagggatctagaactggaaataccatttgacccagccatcccattactgggtatatacccaaaggactataaatcatgccgctataaagacacatgcacacgtatgtttattgtggcattattcacaatagcaaagacttggaaccaacccaaatgtccaacaatgatagactggattaagaaactgtggcacatatacaccatggaatactatgcagccataaaaaatgatgagttcatgtcctttgttagggacatggatgaaattggaaatcatcattctcagtaaactgtcgcaagaagaaaaaaccaaacaccgcatgttctcactcataggtgggaattgaacaatgagatcacatggacacaggaaggggaatatcacactctgtggactgttgtggggtggggggaggggggagggatagcattgggagatatacctaatgctagatgacgagttagtgggtgcagcacaccagcatggcacatgtatacatatgtaactaacctgcacaatgtgcacatgtaccctaaaacttaaagtgtaataaaaaaaataataatttttaaagtttgcatattattttgttatgtagacatattacaggttatatatccattttactattgttggacatttagtagaaaaagtactgtagttttcatacttacacatgaaccttgaattgtttgattaggtaaattttttttttttttttttttttgagacagagtctcgcttcgtcaaacccaggctggagtgcagtggcatgatctcagctcactgcaatctctgcctcctgagttcaagtgattctcctgcctcagcttcctgagtagctgggattacaggtgcccaccaccacacccagctaatttttgtattttaaatagagacaaggtttcaccatgttggccaggctggtttcgaactcccgacctcaggtgatccacctggctctgcctcccaaattgctgagattacagatgtgagccactgtgcccagcctgattaggtaaattttgactacagcatgctcctgcaagaagccatcttgaacatctttgtttctcttccttgaaggcatccttcatcaaaaagccatttgaccgtggagaagtagaatcaatggaagatgatactaatggaaatctaatggaggtggaggatcagtcatccatgaatctatttaacgattaccctgatagtagtgttagtgatgcaaacgaacctggagagagccaaagtaccataggtaaatacatatttactacttgggatttcttttacttctttatattgatttggcagtataagaggcctcattgatatcaattttgtgcttatttcattttctcttagtatagccttttaggattgttcctttcttatatactttattttttttttatttttacttgaatttattagtttcatattttattcttcatagaaggaacttaagataactattaaagaaataaaaccaggccaggcatggtggctcacgcttgtaatctcagcactttgggaggccaaggcgggctgatcatgaggtcaggagatcaagaccatcctggctaacgtggtgaaaccccatctctactaaaaacacaaaaattagatgggcgtggtggcgggcgcctgtagtcccagctactcgggaggctgaagcaggagaacggcatgaacctggggaggtggaggttgcagtgagccgagatcatgccactgcattccagcctgggcgacagagcgagactccgtctcaaaaaaagaaataaaatcatatgataggttatttcctcaatagaaagcaggaaatgaaaacacacctgtaatgccattgcttttaacctttttctattatttctctgtagaaacattcaaaattgtagtcaacatcaacattcacatgttatgaatgcctgtttaattataagtatttttccaggtagttgcttttcttgatagtcatactttttaatggcttcaccatttttctgtcataaataccataatttacttgacattttttattgtcagaaatttagattcttttctattttcctacaataaacattattgcaatgatcatttgtctaagggtttttttttctcatattttaaattatttcttgacaacagaatcttggataatttttcaaaaagacttttgaagctttcagtatataattaatttcactataattttgcttttcatatacttttttttgtgaagaggaggaaatttgagttaatatgactatatatggctgttgtgcccttctcttagtgttaatgagtgctttttatttttaggtgccattaatcctttagctgaagaatatctgtcaaagcaagatctacttttcttagacatgctcaagttcttgtgtttgtgtgtaactactgctcagaccaatactgtgtcctttagggcagctgatattcggaggaaattgttaatgttaattgattctagcacgctagaacctaccaaatccctccacctgcatatggtgagttacgttaaatgaagaagctcttggattttatctgatgttgctgactaaatgtaatgagttgacatgtaagaatcacatggtgtctttgaagaattgaaattgctttcttgagaaatgaacctgagactagttggaaaataacacttttaacgtgctgtgagcaaatttaagtggatgctgaaatattaaaacttagatgggttttggatagatttattctctttaggtttaattgttataaattattttaattaggctaagaaacatagaccctgaatgtaaaaatattacataacattgtgtttgaagttggaaccttgcctttgaccttagtttatatattttcagttttttggatttgatttcaaaatgatagtgaagttacaagaatactacagttaacgttttaccatatttgcttaatcattccctctctccacacacacactcatacgcagatacacacatcattttctctgaaccattttgagatgaaatcgcacacgtgatgctccttatacttcagtgtatatttcctaaaaacaaggatacacttctgtttagccacagtataatcatcaaaatcaggaagttaacattttgtcattgcatttaggtgtgtagtctgtttagtctccttcaatctggaacagttcttttttttatttatcatgaccttcatatatttgaatagtacaggtcccttgctctgagtttgtctgatgtttccttatgattaaatttatactttgacgagaatgttgcaaaagtaattcctcttctgccttcaccctgtccatttatctgtctgttgatagatatcttcaaatccaagccaacatcacacagtttatctttttttctgtccaaatttataaattgctttactagcagttaaaaaaaacaccccaaaacctgactatccactcaacctgaatgcatttacttatttgctcaacaaccttatatataactaatctaaccatgtgggccattttcttagccctagccccagtgtatgtggaggtagagcctctggcctagcgagtagcaagttgggtcctaggtcatgtccccagttccagcaaattgtcacacatgcctggtgagtccctaattagaacctctgatcacagtaaattgtaggctgagtcattggtggaatccctggtcatgtttcccacccttggtgaaaatgcacgtcaatcccttagagtgagaagacaagtttggttgtgccctgtttgggcccctggtttaggtcctcgcagatactcaagtctctatccctgaccaagaggaagttacatgcttttcttgaagtattgatgtttcaagtcacttcagaacattcagtaacctcatgtacatgactctcatgtcaaataatgaaaaggatcatttaatttcctttgttaatatctgaaaaggattaagaaatatattattctatatgtaaataggaaaaaaaatcccttattatttcagtatagccagaaaattatttggtagttctcggaaactggctgcccagataataactaccattataactggtcgttgcagcagccctttctgtgcatagtaccataaagagccttacaagattgccttatgggaagataggtcaaggtttttgacttcttccctgcccatgattatctctgctttccaaaattcattaatagttttcaaccactggtctattatccccaagcattattttgggagagtggagacttacagtttcagaatcttgctcaagctcttaactgcaacagtggtaataatgatcatttattgaattccacaatagaagctagacttttacgtttattttctctaatcctcacagttatctggccaggtaagtgatatatcttcactctactgatgagggtacgaaggccctagatgacataaggcaagttttttaccagaaaagttaaggctgtggtactgggatttgaattttctgtttgacttcaaagccttttgtttttactatacacctcttaaatatttacagctgtgtgtgtgtgtgtatgtgtgtgcatgtatgaatttatgtttatatacttaaaaaaaatttttttttgagacggaatctcgctctgttgcccgggctggagtgcagtggcgcgatctcggctcactgcaaccttcgcctcccaggttcaagcgattctcctgcctcagcctcctgagtagctgggattataggcgcctgccaccacccctggctaatttttgtgtttttagtagagatggagtttcaccatattggccaggctgttctcaaactcctgaccttgtgatctgcctgcttcagcctcccaaagtgctgggattacaggtgtgagccactgcacccggcctatgtttatatactttttaaagtaaatgatttgtggataaacctgatttttttccctcctaccatcttagtatctaatgcttttaaaggagcttcctggagaagagtaccccttgccaatggaagatgttcttgaacttctgaaaccactatcgtaagaaattaaaaccttatgttatgttcactttaaagttataaaataactgatgtgttctgttaagcttataaagttgaactttttttttttttttaccacagcaatgtgtgttctttgtatcgtcgtgaccaagatgtttgtaaaactattttaaaccatgtccttcatgtagtgaaaaacctaggtcaaagcaatatggactctgagaacacaagggatgctcaaggacagtttcttacagtaattggagcattttggtaggtacagtctattttgtggtcctatttttcttttgctatctgtggatacgaatgcaagttttgtatccacatcagtgatttcttctgatcttcctacatagctaatacatcttttaagaatagcagaatgtaatttgtgtttccctcagtcgcttgaagaactacattgctttttgtttaaggcttggctttctaaaccgtttaactcatttctctgcaaattttgaatcacttaataatttgacatgtatagtgaataaaggataacaagccaaaatcagttgaattgttcatgttccctaagtgaacaaattggccttgtccttatctggttattttatgcatattgtcacattccaagataacaccctgatacttacagaggagcacatacatataatttagaacccttgtactatctgattgctaagtaattctaaatcaatagactgttttttgtttttgtgtttttttgagatggagtctcactccatcacccaggctgcaggctggagtgcagtggtgctatatctgctcactgcaacctccgcctagtaggttcaagcaattgtcctgcctcagcctcctgagcagctatgattacaggctcccaccacaatgcctggctaatttttttgtatttttagtagagatggggtttcaacacgttggccaggctggtcccaaactcctgacctcaagtgatctgcccaccttggcctcccaaagtgttgggattacaggtgtgagccagtgcacccagcctgaatgtggttttgaaatcttcaatataccaaacaaagaaatcttcaatataccaaacaaagaaatttctttctaaagtaagtttactgtaatgtagtttagccattctatggtagcccccaaaaaaggacataatggtataaaacaaataatatacgctaaaatgaattcttttacactaatttcttttagcttgaatttttggcaaggtgagtatgttggcatattccacataatgacaaataagtttagcacagaaagacatattggaagtaacttacaataacctttcagtgagttttctgagtgcttttatcagaatgattatttaactttggaaaacttacttgatttcaggcatctaacaaaggagaggaaatatatattctctgtaagaatggccctagtaaattgccttaaaactttgcttgaggtgagtttttgcatttttttagtaagatctccattgaaaattttaaagcagtctttgtttgttaatgagtaatttttctctatttcatatttaaccacagttcttttcccgtaggctgatccttattcaaaatgggccattcttaatgtaatgggaaaagactttcctgtaaatgaagtatttacacaatttcttgctgacaatcatcaccaagttcgcatgttggctgcagagtcaatcaataggtaatgggtcaaatattcatgaagtatttggaatgctgcagatggcagtagaatgtcttacatagtaacagctcacagttgcaatattaaaaatagctaacacttgttgagtatatacggtgtgcctggcatttatgtttattcttaattcttatacttctgtcacttagattctattatttccttcaatttataaatgaaaactgtgacttagtgaggtaaagtaacttgcttatgccacagagctaacaagtggttgactcgagtgaggtgtgtctactatcatgtacaggagatacggactgtttggaaattactgtgattttatgtgagtttatgaaatgataattagcacattttacattgtgctaattacaattatatttacttgagtgaacatccagtgaagcactggaaggattctatcatgaggatcttttatatttgagtactggaataaacatatattaatttcattctttttttttttttttttttttttttttgagatggagtttcgctcatgtctcccaggctggagtgcaatggtgtgatctcggttcacttcagcctctacctcctcggttcaagcaattctcctgcctcatcctcctgagtagctgggattacaggcgcctgccaccatgcccagctaatttttttatttttcgtagagatggagtttcaccatgttggccaggctggtcttgaactcctgacctcaggtgatccacccaccttgtcctcccaaagtgctgagattacaggcgtgagcctttaatcatgtagtttttgtcattcgttctgtttatgtgatggattatgtttattgatttgtgtatgctgaatcagccttgcgtcccagggatgaagctgacttgatagtggtggataagcgttttgatgtgctggattcagtttgccagtattttatcgaggattttcacatcgatgttcatcacggataatggcctgaaattttctttttcttgtgtctctgccaggttttggaatcaggatgatgctggcatcataaaatgagttagggaagagtccctctttttctattgtttggaatagtttcagaaggaatggtaccagctcctctttgtacccctggtagaattcggctgtgaatccctctggtcctgggctttttttggttggtaggctattaattactgcctcaatttcagaacttgttattggtctattcagggattcgacttcttcctgctttagttgggaggttgtatgtgtctaggaatttatcactttcttctagattttctagtttatttgcatagaggtatttatagtattctctgatggtagtttgtatttctgtgggatcagtggtattatcctctttatcattttttattgagtctatttgattcttctctctttattagtcttgctagcggtctgttttgttaatcttttcaaaaaatcagctcctggattaattgatttttttgaaaggttttttttgtgtgtgtgtgtctctatctccttcactcagctctgatcttagttatttcttgtcttctgctagcttttgaatttgtttgctcttgcttctctagttcttttaattgtgatgttagggtgttgattttagatctttcccactttgtcctgtgggcatttagtgctataaatttccctctaaacactgctttagctgtgtcccagagattctggtacattgtgtctttgttcttattggtttcaaagaacttacttatttctgccttcatttcattatttacctagtagtcattcaggagcaggttgttcagtttccatgtagttgtgtggttttgagtgagtttcttaatcctcagttctaatttgattgcactgtgatctgagagactgttacgatttccattcttttgcatttgctgaggtttgttttactttcaattatgtggtcagttttagaataagtgtgatgtggtgctgagaagaatgtatattactctgttgatttggggtggagagttctgtagatgtctgttaggtctgcttggtccagagttcggttcaagtcctgaatatccttgttaattttctgtctcattgatctgtctaatattgatggtggggtgttaaagtctcccgctattattgtgtggaagtctaagtctcttcgtaggtctaagaacttgctttatgaatctgggtgctcctgtattgggtgcatatatatttaggatagttagcacttcttgttgcattgatccttataccatcatgtaatgtccttctttgtctttcttgatctttgttggatgtttgttttatcagagactaggattgcaacccttgctttttttctttctatttgcttggtaaatattcctccacccctttattttgagcctatgtgtgtctttgcatgtgagatgggtcccctgaatacagcacactgatgggtcttgactctttatccaatttgccagtctctgtcttttaactgggacattttagcccatttacatttaaggttaatattgttatgtgtgaatttgatcctgtcattatgatgctaactggttattttgcccattagttgatgcagtttcttcatagtgtcaatggtctttacaatttggtatgtttttgcagtggctggtaccagctttgcctttccatatttagtgctaccttcaggagctcttgtaaggcaggcctggtggtgacaaaatctctcagcatttgcttgtctataaaggattttatttctcctttggttatgaagcttagtttggctggatatgaaattctgggttgaaaattattttctttaagagtgttgaatattggcccccactctcttctggcttgtaaggtttctgccgagagatctgctgttaagtctgatgggcttccctttgtgggtaacccgacctttctctctggctgcccttaacattttttcattcatttcaaccttggtgaatctgatgattatgtgtcttggggttgctcttctagaggagtatctttgtggtggtctctgtatttcctgaatttgaatgttggcctgtctcgctagattggggaagttctgataatatcctgaagggtgtttccaacttggttccattctccccatcactttcaggtacaccagacaaacgtagatttagtcttttcatatagtcccatatttcttggaggctttgtttgttccttttcattcttttttctctaatcttgtcttcatgctttatttcattaagttgatcttcaatctctgatatcctttcttctgcttaatcagttcggctgttgatacttgcgtatgcttcacgatgttctcatcctgcatttttcagctccatcaggtcatttatgttcttctctacactgattattctagttagcagttcctctaaccttttttcaaggttcttagcttccttgcattgggttagaacatgctcctttagctcagaggagtttgttattacccatcttccgaagcctacttctgtcaattcgtcaaactcattctccgtccagttttgttcccttgctggtgaagaattgtgatcctttgcagcagaagaggcattctggtttttggaattttcagcccttttgcgctggtttttcctcatcttcgtggatttatctacctttggtctttgatgttggtgacttttgtatggggtttctgtgtggacatcctttttgttgatgttgatgctattcctttttgtttgttagttttcctttttacagtcaggcccctctgctgcagatctgctggagtttgctggaggtccactccagaccctgtttgcctgggtatcatccatggaggctgcagaacagcaaagattgctgcctgttccttcctctgggaaggttcgtcccagagcggcacccgccagatggcagcgggagctcttctgtatgaggtgtctgtcgacccctgctgggaggtgtctcccagtcaggaggcacgggggtcagggacccacttgaggaggcagtctgtcccttagcagagctcgagcgctgtgctgggagatccgctattctcttcagagctggcaggcaggaacgtttaagtccgctgaagctgtgcccacaaccacccctttccccaggtgctctgtgtcagggagatgggaattttatctataagctcctgactggggctgctgcctgtctttcagagataccctgcccagagaggaggaatctagagaggcagtctggctacagtggctttgtggcactatgttgggctccacccagttcgaacttcctactggctgtgtttatactgtgaggggaaaacatcctactgaagcctcagtaattgcagacgcccctccccccaccaagcttcagtgtcccaggtcgacttcagactgttctgctggcagcgagaatttcaagccagtggatcttaacttgctggtctccatgggggtgggatccgctgagctagaccacttggctccctggcttcagccccctttctaggggagtgaatgggtccgtctcgctggcgttccaggtgccactggggtatgaaaaaacactcttgcagctagctcagtgtctgcccaaatggccgcccagctttgtgctttaaacccagggccctggtggtgtaggcacccaagggaatctcttggtctgcgggttgcaaagactgcgggaaaagcgtagtatctgggcaggaatccaccattcctcacagcatagcccctcacagcatagtccctcacggcttcccttggctaggggagggagttccccgaccccttgtgcttcccgggtgaggctacaccccaccctgctttgactctccctccgtgggctgcacccactgtctaaccagtcccaatgagatgagccatctacctcagttggaaatgcagaaatcaccaccttctgcgttgatctcactgggagctgcagaccagaactgttcctatgttgccatcttgctgttcccttgttttatttttctctagtatttatgataacgtgaaacatattttaatatatttacttctccgtattccactagtatatatgttcctaaaggcactggtttttgtctgttctgttcattgttgtatttttagcacctaaaacaatacttggcatgtgataggtatccaataactgttttaaaataaatgaatgtacttgaaaaaaaattacatgatgcttcaaaaacatcaaagctgaaaatcatttgagtaactttaaaatgtaagcaatcaataataaaagattactatattgttcagcagtcacataaagtattaaaactaatatttcagtatttgaatatgccgacagtaatgttttcataaactagattttgtgtctaactcctcaggtttggaactgtttttagtaagaccataatgcattgcaaggatttctaatgaatatgtttagtagttcaagcccttattaaatttcacagataaaagcaaatgtatgctgaactttaaggactgaggtaatataagactgaattgaatgtaataaggcggcagtgtagtggtggcattaaaaaaactgaagattcaaaaagtataaattcaagaataacatgcaagtagcattcttttttttaattttacacttgttagattttgtcttagtccctttgtgttgctataaaggaatacctgaggctggatatttacaaagaaaagaggtttatttggcatatggcgtctacatctggtaagggcctcagactcatggcagaaggcaaagaggaatcagtgtgtgcagagatcacatggtgagagaggaagcaagggtggaggcggggaaggccatgccaggctcttttttttaataaccagcccttgtgggaactgaatagtgagaactcactcattccttaccctcaggccttaatctattcgtgagggatctgcccccatgactccgacacctcccattaggcataacctaatggggatcagatttcaacatgacatttggaggggttaaacattcagacaatagcagatatctaatgttcagctattttaagagcagtgagtgaaactagaagaatcagaggaacataaacaattataaaagcttcgattactaaaaaaggataaaagacaaagttgattaaagagttatccttaaatatgtgggtgttacgcaaaaggtgtactgatcaacttttttccatcacataaaacaaaatttaaatggtacataaaaacattaacttacccgctttcagagtgattaaatgttagagcaggttgacattggaatctgtggactcaactaattggtgttcggccagagaacagtttatcttttctggctagtttgagttcagtgctgttcaaatttgagcaatagttaaaatatattttgagaccctcttcagttctaggagaaaatagattttgtattcaagaccttaatactaagctgctggtctgaacctctttaaataaactcaggttttgttagtctttaagaaagagctagtatgttattatgtctcacagagtgatttatttttgttctggaatatgctttggaaagtagggtttgaaattagaaaattatttcactttttgtttgtttgtttgcttgcttgttttaagattgttccaggacacgaagggagattcttccaggttactgaaagcacttcctttgaagcttcagcaaacagcttttgaaaatgcatacttgaaagctcaggaaggaatgagagaaatggtaattttaagtaacatgtatttgctgttatcatatgcttgctatgaatatcccataaattacttcaccaagtttggtataagagagtttataatccagtagtttacagtataaagctgctctaaaacaactgtatgaattgattgaaactgcattctttctgggtcacaatgggtcaaatcatagcaatttcttttggtttagcatttttatggagaaacccaaaatttaactgagtttttatgggagtataaatggctcccttttttattttaaaaatccttttatatgtgatctgattaaaagctaattaagggaacaggtgacaatgggaagaaatggattgaggagaagaatctcacacaaaatcaaatcattgtggtgtttacagtgaaacttgtgatatttcacgtttctgtagaataatatattttttatggtaatgattatcttagagttcaaattttttcatttatttatgccctggtttgtttcttacaagtatttaaggtagttaaataactgtcaagtctgtgatagcaggaaattgaaaggaacaattgaaagaatgtgagtttagaaaagaatttcaatagattagaaagataagtgtaaataacataaaatctaatgagataatgtatattatacattttaaatcagcctgtcatctgcaaaaagggaaaatactgatctgacagcaattcatttagaaaaagacctaggaagttttgtatcttgtgattatagtatgaatcaacattgtattacagttaccaaaaaggctaactctgtcttacactgcattaatagaagcatattgtcatgaacaaagttaatacaagaacttggatcttttatactttttgctttatttttagatcttttaatttttatgggtacatagtaggggtgtgtgtgtgtgtgtgatacgggtatacaatgtgaaataatcacatcatggagaatggggtatccatcccccaaacaaatatcctttgtgttacaagcaatccaattacactgttttagttattaaatgtttctgtattttttagaggataactataatgtttggtttggttctgagtaaagtaaaagatttttagccagaatgttatagatctgtgtcttataaaaaatggatgaaggaattgacttagtggaaagctcacatttgtttttaaacatgtcagtgcttgtgatttagcaaaggtattggtccttactctttcttgtaccaaaagacagaactaggattagtgagtaggaggtttctgaaatgtgtatagcttgtcaaaaaatctggagttcagttgggattttataattgattgttaaacatttacattttacattacattttttttttaatttctttttaagtcccatagtgctgagaaccctgaaactttggatgaaatttataatagaaaatctgttttactgacgttgatagctgtggttttatcctgtagccctatctgcgaaaaacaggctttgtttgccctgtgtaaatctgtgaaagagaatggattagaacctcaccttgtgaaaaaggtatatatggatgagtattttattagaagcttccttaggtcactgtgaaataatttaaaaagttaaagctagattttctgagtggcacttatttaagactaggaaacaattttattttttaggttgggaatattggaaagcagttatacaaaaactattcaaatggtatatttatggtatgcactgtttcttacattccatttaagagcatttcacaaggctttcattgtactaacaagagtgaatgacttgtccaccagactgaccaggcttttggaaatagtatttattgagggaaacacatggagacaagagcagcataggtgttttgcccggtagattctggggcagcacattgggatccagcagggccagaagtcaaattttagagctatcaggcttttaagttcagttatcaggggagaaggactagggtccaagccttataattactacatcagcacagtattatagaatgttggccccgtctcttttccatcacctcagcatttatggtttaggaagttccagacctttccattgcaaatttttatgtgataaatcagtggtaggtcagtggactgatattatgccagttaacattctaccagcatagtttccatggtgctttggagtaagccagcctataatcagttagccttttacctctcagtataagacttgttcggtgtttcttaaaagtatacaaatacattacctaataatcataagtgttatgtattgtttggatttttcttatttggatttaagcctaagagaaataattttactttatatttatttatttattttgaaagacagggtctcactctgtcacccaagctggagtgcggtgatgtgatcatggctcactgcagtcttgacctcctgggctcaagcgatcctcccaagcctcctgagtagctgggactacaggcatgtgccaccacacctggctaatttttttttttttttttgagacggagtctcgctctgtcgcccagactggagtgcagtggcatgatctcggctcactgcaagctccgcctcctgggttcatgccattctcctgcctcagcctcccgagtagctgggactacaggcgcccgtcgtcacatccacacacctggctaatttattatacagacgggctcttgctatgttgcccaagctggtcttgaactcttgggcttaagcaaccctccctcctcagactcccaaagcgttgggattacaggtgtgaaccaccactggccagtaattttacattaaatcttcctttaagtataaccaaatgttggaaactcttagcatatttttatatttttatttacttaacatttattaagggtttgctatgtgtcagatactgtgccagttgagtacattttcttaattattattcccatctcatagatgaggaaatcaagaaaagttgaatgaatgttgtttctaggtcctactctaaataatattaacaagcatttaaatgatttatttttttcatttttcttaacacattgactttttggttcgtgcaggttttagagaaagtttctgaaacttttggatatagacgtttagaagactttatggcatctcatttagattatctggttttggaatggctaaatcttcaagatactgaatacaacttatcttcttttccttttattttattaaactacacaaatattgaggatttctataggtaagtttatacatgacatatgtgaaatttgtttaatttaaaattagttaacaatacttagcaagtcccctcaccagcaacacacataccatacccatacacatgtgtgtgtgggagcctacatagtatgagaagcaggacagcttcttttaataagaatgtattgaagggagtcactggacttcagatctggtcctagctgtgccaacaaccagctatctgactttggtcaaaccacataaagaccctctatgccttggttttttaatatgtaaagtaagcaagttacacaaggagatctttcaggtccttttcagctttaatatttgatcatctttcctttggaaaaaattgaagataaattactagtagctggttatttctgccttgtttttcttttctgttgcttgactataggcctcttagttattacttctattagatttagaaacttaatgtaaaactttattttgctaactttaactctgtagaagaaaaatttgaaaatggagaggtttgaaacaactaaaaagtaatgtttaggtatcaggatgatgggaaggcatctcatatttgttgaacatgctctgtgttatggactttgctatgcattttacatgtagtgtatcacagatctgagtttcagacttatcctaatagagttttctaatagattatgagttgtatgtaggtagtttcctttaagaaggatattcctacaaaagtaaatttagtggtccttatagttcattcattttggcaagaacaatatagctatatctctgtatatgcgagggattcattccaggatcccccatgtatgcctaaatttacgcgtactcaagtcaccaagttggccctgcagaacccacgtatatgaaaagtcagtcctctgtatatacagactttcacatcctgtgaatactgtttttctatctgcatttggttgaaaaatatgcaagtataagttcaaacccatgtttttcaagggtcaactgcatttatgttagttgattatgcagaagaaataaatataaattcaagtctccatttttatttgtttattgttttgttttttctttttgctaagggtgctactgaacaaggtcccatttttaaatcccataattatggtggtggtatgttctaagctttctaatttttttaatgtgactatttagaatttacttaatttttccatttataaaattaaagaatgtttaataatctggataaagtatgatactttaatgctgatggtattaaaacagtttttaagaactattttataaaattttacttggaaaagttatatataacctgtattttaaatttttctatttttagatcttgttataaggttttgattccacatctggtgattagaagtcattttgatgaggtgaagtccattgctaatcagattcaagaggactggaaaagtcttctaacagactgctttccaaagattcttgtaaatattcttccttattttgcctatgagggtaccagagacagtgggatggcacagcaaagagagactgctaccaaggtctatgatatgcttaaaagtgaaaacttattgggaaaacaggtatggcttcaatttttatgtacttttcattccctgaatgatatgagatataacctttaagttttaaggctatttattcgatttattcgtatttatatattgaaacttagcttgtggtaatcattatctagcatagccaacccatgaatttttttggttatgtcgtgttgtctccctctgattggcttttaactaagtagaaatgttttaaattagaaataatccaaaaaaccatttgaataattttcttctgccatttaaaaatttattttaactgttgtaatacacgaatgcaaactggttgttaaagtcaaggaatactaaacagtgtacagaaaaccttcactccctcttcaatctcaccaagctttccacttttcaagaaaaacaaccgtccctcattcctatagttctcataccctgctgtttgtttttttgtgacacttattaccttctaatgtatgatacaatttaccttttttttctgtctttgcttttgtttttgagacagagtcttactcttttgccaagactggagtgcagtggcatgatctcagttcactgaagcctctgtctcctgggttcaagcaattctcctgcctcagccacccaagtagctgggactacagctgcgcaccaccacacccagctaattttcatatttttagtagagacggggtttcaccatgttggccaggctggtctttaactcttgacctcaggtgatcttcccacctcagcctcccaaagtgctgggattacagatgtaagccaccttgccagaccataatttacttttgaattatgtttattatttaccagtcttctccagtatacatttttctctctttttttttttttggctgatgtatctctaatatattttgagtattcattaaatgtttgtcaaaagaaggagtcaagtaaggaaggatttaaaaagcttcgtttgttttataatcatttatatacatttccaaaattttttgaagcaacttatattaaaacatacatacaaattttttaagataaaaaagctgtggtcaccccacatttatgtatgtatttatttattttggatataagtaagggataagtaaccaaacttggtcaatattagataaacttcaagggaccttttttttttttagtttcctagttatctatattgaaccaagaaatggaacagcaagttccttagttgcttaggtggacctattcagaactggttgtaagtctgcagtctgaagggaaatggtgagcagaggactcctttcccaaagacagctggaacagaaataggcactccagaggttatggaatttgagagagatactcagcctctagccactcccattcaatctcccagcttagtcttctgagcattcttaatcttactattcttttcttaatgtattcaaaccaaaagacagcaatttttagagcctgaataggttttggagggaaaagtaattacgttcaacttcgattgaaactcttgcctcaagaatgaagaacagcaaaaattaaatcacagtttcttagctttttggttaaagatgtaagttaaattcttggccgggtgcggtggctaacgcctgtaatcccagcactttgggaggccaaggcgggtggatcacctgagatcaggagttcaagaccaacctggccaacatggtgaaaccccatctctactgggtgtggtggtgtgtgcctgtaatcccagctgtttgggaagctgagtcaggagaatcacttgaacccgggaggtggaggttgcagtgagccaagattgtaccactgcattccagcctgggcaacagagcaagatttcgtctcaaaaaaaaaaaaaaaaaaaaaaaaaagaattgtataaaacacacaaacaaagcaaggaaagaatgaagcaacaaagccagagatttactgaaaatgaaattatactccacagagtgggagtgggccctgagcaagtggctcaagggcctggttacagaattttctggggtttaaatacccttcagaggttttccattggttacttggtatacaccctatgtaaatgaagtagtggtctgtaatcagtctgattggttataggaggggaccaatcagaggtactttcaatttcttatctgccacagtaaaagggagggggttgcaaagggagtagcctcttgtccttttgttacttgagcatggaaagttggggttttccttttgatttcgttctaggaggtcagcatggattgaccttaggttccctgcctccagaccttattgccctgcctcatttacgttaggtttctttcttgtcaccttctaaaatattttttgttattaggaagtatgtttttgaacttccttatgcattaagtaaattagccatttatcactgtaattccttatttggaaagttgttatattcacccttaagacttcacaattctcattcatttaactaaagtgcaacatagcagacttattctttatatttagagaatttgtgtcttttgtgaagctacctgtctatagtgggaagtagattaatgaaaagtccaaatctgttggggagggttttattctactattgatgaaaggggatgtggatcgcagctagccttagaatttgggatggcactcaagtagaagtctgggaagaagttacgcagggaacaaagatgacattgttcgcagtccctgggaattcttaacagtaaagttctgtaattgagacagaattcccaaataaagtcaagagtaaaattcagatagaggagcagttatacatcagtgggaaatttggttggcagaaaaattaccaggtcatacaacttaatgatagacctgaagtcttatttaaaatgattctctaaaattgaagaattggattaagggggccttgtttggctgattttcatactttttcctcttagtctacaggttggctgcatagaagaaaaaggtagagttatttataatcttgtaaatcttggactttgagtcatctattttcttttacagtcatcgaatacttttggaaataaggtaatatatgccttttgagctgtcttgacgttcacagatataaaatattaaatatattttaattttgtgcccttgcagattgatcacttattcattagtaatttaccagagattgtggtggagttattgatgacgttacatgagccagcaaattctagtgccagtcagagcactgacctctgtgacttttcagggtatgtacattttaaacttagagaactagctctaacttcacaagtttttaaagaagtttattggttgacaccttcaatgtctatttcaatttatagacatcactctttttaaaaaattttctttaaaaatagccacctttgaattgaggtaattacctatcctcttttaccatagtctccccacagtaattactctttctaaattgaccacttggttggccaacccaataaccttttcttagtctttctgtaatatttgaacattgtgccatctgttggcccttgaaatttttttcttcatacacattattcctagttctcttctctttatctaggtcttgcctttctagatcaccttttctttttttttttgagatggagtctcactctgttgccctggctggagtgcagtggcataatctcggctcactgcaacctctgtcttccaggctcaagctatccttccttccacctcagcctctcgagtagctgggacgacagatgcacatcactgcgcctggctaattttttatatttttggtagagacggggtttcactgtgttgcccaggctggtcttgaacttctggcctcgaatgattcccccgtgttggccaaccaaagtgctgggtctacaggcatgagccgccgtacccagcctcaccttttctttattgtgcgttattatctgtacaatttaatttggatgtgaatgtctctgagttgtatatgaacatcagagttgtttccctggcttgattgtaagctacttgaaaatatgctttacttttttttttttttttttaatgtgccctactgtgctgggcatataaaatagtaataatatctgagaaagtactttcacatatgtaatttcatgctgtctaaataagtgttgattgccatgtcttaaagtactgcttttacagtactggcatagagctttgattctgatctgaagtaatactgaggctcatttattgaactgccttttaactttataagattttttaagaaaatcattataagatcatttaagattatttaagttactgagggtgaaaggtatttagataatctgatttatatatctggactgtgatatgtcatttgtgattttattgaaagtatagtttttcagtagaaaaatggtttttgaatttgggggttattaaaatctaaattttcattttggaagttcactggtctatgaacaaaactttttaaaacgatgactgtattttttcccttaactctgttagggatttggatcctgctcctaatccacctcattttccatcgcatgtgattaaagcaacatttgcctatatcagcaattgtcataaaaccaagttaaaaagcattttagaaattctttccaaaagccctgtaagtatacatgatgagtttaataatagaacattccttcttttttagctaaaaaaactttgtaaatacatcttaaagaggaaaagtaaacaaatgaaaaatttatctcataattaaaaaggaaaacattcatttacaagtttaaatggtattttacttgtcagcattaattgaaatatgttacatatgagaacagaatcttgtgacactttagtgatatattagctcagggaatatatctactttttcataggaatatactatttaattgtagtttactttctgaaaattaaataaattggcaatagtttaagatagtaattttcttaatgtaacattttgtacttgatatcaaacccaaatctaaattctgttatttagttattttaaatataaaatgtgtaggtattcaaatatttgaagaaaaaatataaagtgtatttattgtagccgagtatctaattaaacaagtttttactaaatctgtttattttctaggattcctatcagaaaattcttcttgccatatgtgagcaagcagctgaaacaaataatgtttataagaagcacagaattcttaaaatatatcacctgtttgttagtttattactgaaagatataaaaagtggcttaggaggagcttgggcctttgttcttcgagacgttatttatactttgattcactatatcaaccaaaggtaaataacatatttagaccaatatataagcagtctttctatcctgttcttcctgtttttttgctttgttttgttttgttttgagacaaagactcactctgtccgcccaggctgggtgcagtcacggctcactgcatcctcaacctcctgggttcagattatccttcctcctcaccctgccgggtagctggggctacaggagcataccaccatgcctgactaattttttgtgttttttgtagaggtggggtttcaccatattgcccagggtggtctcaaactcctgggctcaagcgaactgtcagcctcagcctcccagtgtgctgggattacaggcatgagctactatgcccaacctatcctgttcttttaattgaaagtttatatgcttctaagaggtagataccagaatgttgctttctgaattttgctttttaagatgtctattatatttacttattagtttttaaaaattgcgctacttgcctgggaaacatagcagacctcgtttctactaaaaattttttaaaaaagaaaattagggcaaggtgtggtagctcacacctataatcccagcactttgggaggttgaggtaggtagattgcttgagcccaggagttagagaccagcctgggcaacatgatgtgaaaacccatctctacaaaaattttttaaaaaataagccagggattgtggcatgcacctgtagtctcacctactccagaggctgaggtgggaggatggcttgcgctcaggaggcagaggttacaggttacagtgagcaaagattgtgccactacactccagcctgggagacagagcgagactcttgtctcaaaaaaaaaaaaaaaaaaaaaaaaaaaaagaaaattatccaagtatgatgatatgcgcctgtagttctagctacttaggaggctgaggtaggaggatggcttgagctcaagagtttgaggctgccagtgagccttgattgcaccactgcattcatgcctgggcaacagagtgagactttcactcaattaaaaaaaaaaaaaaaagcactacttctccaattctagaaatcttaagaaggatcttcaacattttaatactaatattctagctattgatggcctcaaataaatgttactatagaattggggttgttcggccgggtgtagtggctcacgcctgtaatcccagcactttgggaggctgaggcgggtggatcacaaggtcaggagatcgagaccatcctggctaacacagtgaaaccccgtgtctactaaaaatacaaaaaaattagccaggtgtggtggcaggtgcctgtagtcccagctactcaggaggctgaggcaggaaaatggccagaaccaggtaggcagatcttgcagtgagtctaattcgcaccactgcactccagcctgggcgacagagcaagactccgtctcaagaaaagaaagaaaaaacaaaaacaaaacaagaattggggttgttcaatttagcatctctgatcttttccattgattttaatgagatttctattttttaaggtcttttttattgtggtaaactatataacataaaattttttattttcgccattaaatggccagttcagtagcatcaattacatttccattgttgtgcaaccatcaccactgtctatgtccaaactttcattatctcaaactgaacctctctactcattccacaataactccacattcctcctccccactggccattgagaaactaatctattttctgtctcaatgaatttgcctattgtagatattttaatctagagttgtacaatatatgtccttttgtgtcttgccttgtgtggtcactgaaaactttgtaccttagcttgtgtttagatagtgtttgatagagatttccttggataccaagagtgttgggatgaggaagcatgagaggagaaaacttttcctagtgtttgcagattggctttatgctaggattcttcttcaacacttagccatgcttgcattgcttgggatcagccccaaatacaagcttagggtcttctctggtcttttctgagcaagagtcttatcttgagcatgtgtgtggctttctgaattccccctaatttgtgggtgcttttgaatatactaatttcccaaagaaatacgctccccagctactcctaggctttaggcagcctcttgtatgtctcaacagtaatcttttgccctatgcacctgcaggttgttggtctgccttacaaagtttcaagcaacacccatatcttttgtagctggtatgaagttaaacaaaacagagctacgcactttacatcagtccttggttccagacaggttagaatagacatatacaatagtttgcaactaatctacttagctccatgaactaccatgagccagtgtctcacaccgaggatataggccactgcttttgtgattgttgccacgctggggtaggggtgggcaaggacaagtaaagttaccacaaagctttcctgctgtttttcagttggatttttcttgattcaatattttcctgattactgtaaacctttgactattttacagaattctaacaaaattagttctgacaattttgcctgtttttcaatgtttctattaaaggatggaagcttagagctgcctattctgcattttgctgatgtgacttctctttttggcttataagccattaaaatatttatgtcaaggcatataagaattagagatgctgaacaaaaggacttctgaatgaatttatttcagagtaattttccagaacttactggttgttgttgtttttttttctccctatattaggccttcttgtatcatggatgtgtcattacgtagcttctccctttgttgtgacttattaagtcaggtttgccagacagccgtgacttactgtaaggatgctctagaaaaccatcttcatgttattgttggtacacttataccccttgtgtatgagcaggtggaggttcagaaacaggtaattttctgactcatcttcaaaatggtatttaaaatatataaagtattgttagaaggatttgagtgttttatgtttatttggtataattggtgattttattgagaatattttttgtaaaatgattggaaaaatattcttaatgaattaacctttgtaatcaattacagagcacttggtacttttgatagttttatctactgtgctgaagtagagaggtagtcaaaactagggatagcagttcgcaacgttatggtggtatttgagttactacttatataaactgtttcattaatattggcattttttttaacctcagtacccatcttgtagtagtaccttacatagttattgaattatttgaaaacacagaaactaaaagctgggtatcttagacgtaattagaacatttaatctgatctaggttaatagattttatcatttattacagtaagttttgttggcttactttaaaattatttctctccttataattttttctttttaaattatatttaggtattggacttgttgaaatacttagtgatagataacaaggataatgaaaacctctatatcacgattaagcttttagatccttttcctgaccatgttgtttttaaggatttgcgtattactcagcaaaaaatcaaatacagtagaggacccttttcactcttggaggtaataaaaatttcatcatctactattttttattagagaacatagtagtacttttcaaaaatctgtaatgctctagcagtaaaaaatggaatcttttctttaattgtgattaaaaatatatacgtaggccaggcacattggctcatgcctataatctcagcactttgggaggctgaggcaggaggattgcctgagcccaggagttcaagaccagcctgggcaacatggcgaaaccccgtctctacaaaaaattagtcgggcatggtgatatgtgcttgtagaatcagctactcaggtagctgagatggaaggatcacctgagccctggaggtcaaggctgcaataagccaagattgctccactgcattccagcctggatgacagagtgagaccctgtctcaaaaaaaaaaaaaaaaaatatatatatatatatatatatatatgtgtgtgtatataaacacatacttgtgtgtgtgtaacgtgagatctacctacttaagaaataaaaaaatgaatcttaatgtatctctttgcattgaagccaaagtataaataacaaaacttcctggtaaagatccaaattgtaagttttcaaggaatgtgatgtaaaatagttttgattttaacacataagatcctaaggtccactgatagctcaaaactaccaatggatcttttcaatgtcaatttaatgtttgtgttagagataacgtttaacttttgaaagcatattttaagttttaatctttataaacctcgaaattatgtttaggtatattcttccatacatatcttaattataatttttaaatgatagtctgtatttgactctatgtaaatataaaaacatatttaagtatgttaagatgtaaagttatactactaaagagaaatttaagcatttccttccagttgagtatgctataacaatcttgaagtctgtgttaccatgagagagtctattagaatttaaaggattaggctgggtgcagtggctcacgcctgtaatcccagtgctttggaaggctaaggcgggcagatcatctgaggtcaggagttcgagaccagcctggccaacatggcaaaaccccatctctactaaaaatacaaaattagctgggcgtggtggcacattcctgtaaatgccaccttttcaggaggctgagacattagaatcacttgaaccggggaggcggaggtagcagtgagccttgatagcgccactgcactctagccttggtgacagagcgagactctgtctaaaaaagagtattaaaacattgtagggtttgcagtggaagaaatcatttatttcttccttgattagtagtaatagagacatgagtcagtgtctataaatggcacttaactaatttttttcttttattaagttttatttcacaggcttaaccaatacgtgttaaaagcaagttacattttctcttttaggaaattaaccattttctctcagtaagtgtttatgatgcacttccattgacaagacttgaaggactaaaggatcttcgaagacaactggaactacataaagatcagatggtggacattatgagagcttctcagggtgctaattttaaatgacatgggctatttctacctgtttctttttgaaagaatattttgcaaagtcttgctcttggtttcattgtcacagacttagttcagactctcatcatttagttcagaccctcatttctcatctaactgtaaaactggtcctaactggtcttctcaccctgaactcttcctgttttattcatcctctgccagatgatttctctaaacccaaatatgatcatgtttttctactgcctaaattttttttttaagagacagagtttttttttttttttaagagtctcactctgtcacctaggctggagtgtagtggcaccatcataacttactatgaccttgaattcctgggtacaaggaattctcctgtctcagccttctgaatagctggaacaacaggcacacaccactacacctagctactttatttattttttttattttttgtagggacaggggtcccactatgttgcctaggttggtctcgaattcttggcctcaagtgatcctcctgccttagcctcacaaagcattgggattagaggtgtgagccacggcatctagccatgcttaaacatttttcatttctttttctttttttttaagacggagtttcgctcttgttgcccaggctggaatgcagtggcactatcttagctcactgcaacctccacctcctgagctcagattctcgtgcctcagccttcctagtagctaggattacaggcacctgccaccatgcctggctaattttttgtattttttttagtagagacggggtttcaccatgttggccagggtggtctcaaactcctgagctcaggcaatccgcccacctcagcctcccaaagtgctgggattacaggcatgagccaccgcggctggcccatgcttaaacatttttaacaccttccaaccatgtaaaagaaaattttaattccttagagccagacatacaagttagtcttgtcttctagtccagtttacctgaatgaaagaaatatgtctcattttaatactttagtcatatgtgttatgtgtgtctatatatatgtaagtatgtatttgtaagtttttctagcttgcttgttaatttgatttgaaatgtacattattacagtatttgggaaactttctactttgtgttttgattttcatcttcctataccaattaatttcatatttcttttttttttttgaaacgaagtctcactctgtcgcccaggttggagtgcagtggcacagtctcagctcactgcaacctccacctcctgggttcaagtgattctcctgccccagcctcccaaggagcagggattacaggtgtgtgccaccatgcccagctaattttttgtatctttagtagagacggggtttcaccatgttgtccaggctggtcttgaactcctgacctcaagtgatccatctgcctcggcctcccaaagtgctgggattacaggcgtgagccaccacgcctggcctaatttcatatttctcttgtgttgtttttactctcagtactttttaaaatgaattttagttttgactatctgagcatagagtttctaatacatttgagatatataaaatgtatgtaaatagaaacaccattatttcttgtacttgtgttcttgagtattttatgggctagagatctgccttgtgcattacagccactagccatttggctatttaaatgaagtaaaattaaatgaaatttgaagttcagttttttcattggtactgaacacatatcaagttctcagtagtacatttggtcagtagtgatcattggacagtgtagattatagacatttccatcattgcagaaagttctgtgggacagtgctggtctaaactctaaatgttagatgttaaaaagccaagcaggctcccaaagtcccttctagctttagtgttgaatgattcttgtgcttctgtttgtgattttgctaaggtgttgacttatctgcacaatttgtttaagacattttattttctctgttgtcacatattgctaatcactttcaaaagaatctgttgtattaaggaagttcagattcattccctacatattttttgagctactcatgacttaaaaccttttttaaactttatagaagttttctagtcagataatttaatatatatgcaattataaacaaaagtgttgtcttcatgctagtttaaactaatttttaaaaaattatttctagataatccgcaagatgggattatggtgaaactagttgtcaatttgttgcagttatccaagatggcaataaaccacactggtgaaaaagaagttctaggtaaactacagtcatgcgctgcgtgacatttcagtcaactgcggatcacatataggacagattataatactgtatttttactgtatgttttctgttgcctgtagtattcagtatagtaacatgctatacaggtttgtagcctaggtgtgtagtaggctataccatctaggtttgtgtaagtatattctgtgatgttcacgcaatgacagaattgcccaatgacacatttctcagaacatatctgtgtcattaagcaaagcatgattgtattggcggaatgaatgtgagttatgcggtggtcatctttattatatgagtggttatctttattatatcttcaaaataagtgagggtttgtcatttgggatattggggaaatatgagatgctagctaagttacatgcctatttaattaaaatgtccctaaaaaggccccttttgtacttttcttccttaaatattcatataaaatgaaaagttagagatttacatatgtgtataacttaatttgaaaatgccttgtaaatatttaggaaagtcagaaatacttgtttttagagttaagttgcaaataaattgactgccgatatattttataaatacattataactgacaggtactcagtgtcttttgttatgtagcagacataagaatgaagacttggagggctagattaaacttaaataattaaaaaccattcaagtcctttcctacagccatttgaggggaaacctaatgtaaaataagaagccaacatcatctctagtttaggtgtttagatttagtgaccacgggatggagaaatcacctggttaaagtcagcttgaagctctcgtgatggtttttgtttctaattagaaaaataggaataagtagtgtttcacagattctactatctttcttcaacagccttaacttctcattaggagcctaatatctacagtacttccttttttgtagattttaaaaaattgagatatatcctaatatagaaaagtatacagatcaaaaatatctagcttgaagaatgtttgcagagtacgcttgtacatgtagcacccagactaaaaaacagaatcttaccagaactgtagaagttttctttaaccaacatacttacctccttgtccatagtggcactgcttttatggacagacctgatttacaacagaagccctaagtggctttcctgtgtagcataaaattaatgtggtttgttctcacagctttccccctaagatcaggaatgagacaaggctgtccactttcactactgctgttcaacagtgtactggaagttctagccagagcaattaaacaagaaaaagaaattaaaagcatgccaattagaaaggaagtaaaactatctgtatttacagacgacatgatcttatgtatggaaaatcccagagaatccacaagaaagctactgtagtgctaataaatgaatttagcaaagttgcagggtacaagatcaacacataattagtggtgtttgtatatactagcagtgcacaatccagaaagaattagaaaagcaattccatttacgatagcatctaaaagaaataaatagccaggaataaatttaatcaaagaggtgaaaaacttatatacattctgtttgttagacgtgagtcactaagtacagaccacactcaacgggagggaagttaggctctaccctttgaaagaagggctctcaaaaaatttgtgaacatattttagtaaataccatcatgatggaaagagcacgaagagccctctgggttgctgaaaatgtcctgtcttcatctggttagggagaacacaggcagaaaaaaatgtgtatttgtatgtataaattttcattgaactgtgtgtttaagattatggaatttgtgtgatacctcaacaaaaattttaacagttttaaggttgattctctctctctttttttttttttcttttgtcacccaggctagagtgcagtggtgccatcttggctcactgcagcctccgcctcctgggttcaagtgattctcctgcctcagcctcctgagtagctgggattacgggcctgcgccaccacgcctggctaattttgtatttttagtaaagatggggctttaccatgttggccaggctggtctcgaactcctgacctcaggtgatccgcccgcctctgtctcccaaagtgctgggattacagtcgtgagccaccgcactcggccttaaggttaattcttgaagtacagaaaaacagcattatagttttgaaattagaaaatttcagttttatgtatgatctcttacctatgactctactgaaatagaatttctatatgtagaggctgttggaagctgcttgggagaagtgggtcctatagatttctctaccatagctatacaacatagtaaagatgcatcttataccaaggcccttaagttatttgaagataaagaacttcagtggaccttcataatgctgacctacctgaataacacactggtagaagattggtgagtatttattgataccttatatgtaatctcaatatgacattcatggagaatgatacttcacacaaatagatattctcagtaactaaagctttgtccttttttaaatctcagtgtctttatgaaaattcttatatttttattaattcacataattatttaccctactatgtgccagacacttgatataatggtgaacattccagacaaggtccctgttaaaattttagtgggactagacaaataaacgataaataagaaaaatgccagatggttctacacagaaaattaagataggggaatataaagggagatgttttaggctcttgtcagtatcagaggtgccactctcctctaagcgaggccttattttgatccttttaaaataagtcgtaaagcagagaggttgttttataatcctagaagtcttaagctaatcagacagggtcttctattacttattctctgtgcaaagcagaattgcaccacatatcaaaatttcaactggttggttgagattacttttgcgtgcatgctctttctctctcttatttatttgttgattgattgattggtatctttgagtactccatcaccaccatatttgatggtagcctcaaagggttttcctcacaaccaggcacctttctaagataaatacgtgttttgatttttttctgtacttcccttcctccttctcttgaggaataaatgattggcaataatgtctaactgccatgtttccgttattgatttaatgtacctgtatatttctttcttttgttgttgtttttgtttcattaaacaaatttgtatggtttctttccaaacattttattataaaaagtttcaaacatacagcacaatggaaataattttatagtaaacacccatatgcttatcatatagtatctatattttatgctgtccttgcttaatcacttctagccatccgtctatccttgtgttaacatgtattaattcatctctctcttttttttttttttttttttttgagacagggtctcgctctatcacccaggctggagcgcagtggcatgataatacatcatagatcatagctgactgtaaccccaaattcttgggctcaagcagtcctcctgcctcagcctcctaatgtgcaaagtttatgtgcttgagccacaccacactcagccagttcatctcattttttaaatgtatatcaaggtatatcaagcacagtttttgaagagagtgccacagaaaatttgcgagcattaaatgtttcattcatttcatagtaattcgaaattggtttttctgaaacagatgcacagaaatattagtgtgacttcaacttaagaatactaggaagcaggtacaagttttttgtatttttctttaacagggaaaaactttagatcttcaagggactttagcatatgaagatgtggacaaaaggattcccagaatttttattacttatatgtattagaacatattattttcaagtatttcttgagtctttttaatttatagtagtcacaattaaactgtattgaatgaagggaattgcagttgcagtgattagtaattcaagtttactgaatgactagtgaaagtcctttgatacttttatttgatattggagaattttgtaaatgtaaagtttcctaatacaaattttaaattttagttttgaaattttttcagtggaggttaacattcatcaagattaataactggtgtacttgataggcatttgaattgtttttttcagtgtcaaagttcgatcagcagctgttacctgtttgaaaaacattttagccacaaagactggacatagtttctgggagatttataagatgacaacagatccaatgctggcctatctacagccttttagaacatcaagaaaaaaggtctcttaagtaataaatgtttattgaatacccagcatatctaaaacagttctgtttgctgtgggtcatgactgttaaattgcttgaaatagtattgtactaactattaacctttcctataagtaatttaagccatatttcataaatccagggaatgtgttatttttaatttattatggcagtgtggaaaagctcagataggtaacctgaggaaatagtagttgatttttgggggaggggaaattcttaaagacagaccttgtttttttagaaatagaaagcgctactttgctcccatgaaagctgttagctctgggtatggtttatagttattgtgatccacaagtgtttatttccatgtcaagttaacatatcacaatcccctggtgaaatataggaagacccatagatttctccctttttccatgttgatatcgtaataaggttccactgtaagtattctgtgaagcatgtttaagaacacttgttccttccttagtctaagcattcctctttactatcttcttttcataaagtgactgagaaatacacagtttagttttcaccaatttaatttcagggcagaaacccaacattgaagcagtactttcagtgcatcataaatataattttagtgttagtaaaattactggtaatataaactgttaatgaaactaataatataacctggaaggcattataattctaacattttaaaatctcatttcattttgaaatcaagtctctgtggtagatgtggtctagttttgttcaagagacagatgagtcagagtttgtgatttgtgtaatatgctactaatgagtgacagagctgagagtagaacctaatttttctgctgcctaaagcagcagtttttgccataccactctgcctcttgtataaacataaatgttttcatcttaaaaggtaaacattgcctccagatttagttttaactgtatttagctttattcagaaagatttgttatactcattttgtgtaggaaaggtacaatgatttccacttctcttatttacattttctaatccctttctttctagtttttagaagtacccagatttgacaaagaaaacccttttgaaggcctggatgatataaatctgtggattcctctaagtgaaaatcatgacatttggataaagacactgacttgtgcttttttggacagtggaggcacaaaatgtgaaattcttcaattattaaagccaatgtgtgaagtaagaagattaattagtctgatataattccttgtttatgacctgtttatctaaagagtgctgtgatactgcacatcatcttcacataatatcacccccactcaaactgttgtaaatttattaaagtgagcatccgtatttagtcataactttatgcattaggtttcagcttcgggatagcaacatactagaggagttctaaggggtgccttgaataatttgttactaatgatagttaaaatactgctgattataaattatttgcattaaccaagagcctgttctaactttgtttacgtcttctgataagagcacctttattttccctgatatgctttcttgaataagaaaaaggagtggggcagcaatcagcatagcttttttatttttgaggatatagtacaatttatctcaacgaagagtaaaggtacataccaaatgaaacaaagtttgtactcttccatcaaatgtgtaatctaaaacagcatactatgatgctctaagatttacagagttaatttatagcactgtcaaatgtgattcaacagaaatgtgaaaatacaacatctgatgaggtcaaacatctgctgattacagataactgatagagaagtattttcgtaatgtactcacattgaaagcaatgtaagaagcagttcttattttctacagaaaaagtagtgacagtgaataaaacatcaccttctctgcaatactacaccgcactcataccaattcagcagagtggtaccctgaacacacatacagcttatttctcattagtgaacaaagctaagatttttataaagttttacctttgagccagaaaataaaatgttccaaatatacatatgtacacaccccatttgtggtactttaaattctctagctctaaaactggtgttttgccttgtctttggtttgaaaaagaaaaagggtgcaattagtaatctataacctgtcttatgtgtgtgaagtatgatgaatatgatggatatggagtgtaatgattcattcatatgttaaatatggagtgcggtgaatagcaaaagtaaagctgaatactgttttaatgtgccagatgtattggagcacttttctgctctttggaatataccacaaataattacccaaattttatgcccagaagttgggcttattaaaaaataaacatttttaacatgactgttgtagttcttcactgaggttagaaaatgcataaaaatcagatttccaacttttgtcttaaacttttgatacctttttccctcttctatcatatcagaaaactccttctgttactaacgcttttcaactctgaaattgtatttaaagtggtgatataatttcatttgtaagcaatattctgtttcattatggtaatggcctagactggaaataaacagttacagtgtcactaacatatatatttgatattgatatactagcctagtgtggttttttaaacaccacctaatacatgttttttgtttgtttttttagcagtatgttgagtttatggcagattaatctatcatcttttagaaatttaatatgtcaacggggcatgaaaattttaagtaaaatgtattaattttactcatttttactcaaactattgggtggatttgtttgtatattctaggtgaaaactgacttttgtcagactgtacttccatacttgattcatgatattttactccaagatacaaatgaatcatggagaaatctgctttctacacatgttcagggatttttcaccagctgtcttcgacacttctcgcaaacgagccgatccacaacccctgcaaacttggattcaggtattctattaaatttttaacattaatactgtaaactcagttctagagaaagatggatttaagatggaatcccactaaaagcactttacaggattaaatctataacctctaaatttgtttcttcatctatggaatggagataaaagttgccaacagttgcaacaagttttcaatgaaataatgtgtgtaaagtgcctaggatagtacttgatgtatagtattccctcagtacattttggctattgataatgggtcaactaattgagctttcaatatgtgtcaggcactgtgcttgcactggcaatattaatgtgaaaaagaaacacccacattctagcaatggaaaaaacaaacacaatcagatattttaggtactgtggtgcagatacgatagaattttcatattttcagagctctggccaactcaatttaaaaagcagcctttggccgggcacagtggctcacgcctgtaatgccagcactttgggatgccaaggttggtggatcacttcaggtcaggagttcaagaccagcctggccaacgtggtgaaaccccgtccctactaaaaatacaaaaattagccgggcatggtggcaggcgcctataattgcagctacttgggaggctgaggcaggagaatcacttgaactcaggaggtagaggctcctgaggctcactagccaagattacaccactgcattccagactgaacgacacagcgagactgtctaaaaaaagaaaaaaaaccctttgtataactataattaacatttagtgtatatccttctaattgtttaaaacaaaaattgaactgtactttatttactcttataacctactttccttctatgacatataatgggtatttctcatgccaagagcataatagcaaaagaaattccaccaagggttgggtatgtataatacatatatgcatgcttgaaggctcattatgggtcagttttttaaacctaaattttataaaaggatacaaaattcacagatctttattgttaactgtctttattatatattattaatgtgttttatatgcaaacataaagctaggtgcaaattcacttgttgtacttaaagaccaatcaattctaatacaaatgttgatttaatgtgatattttgccacaactaatctgctcctcccaatccttccagtcacttcagcaaaggttgtgattactcagttcttccaattgtttcttttagttttactgctacaaccttcatttgacatgactctaatgtcatttagacttcagtttgctatgctttatattttatgtattttattttctgttggctaacagcaattacaaatctactatttggaaaaatataaattataaacatagacatagatgcccatcctgtgatcctactagattataggctgttctctaaatgatctagaatgtgcttatatgaattttccttaggccactgaaatgaaaatcctaaaataaaaattctcatagaggctttgtaaactatctaaaatgtatctcttatctttaattgggaaaatacaggtataagtgatttaagcatttaaaactttaatatgtaatttacagtactattaaaaacaatttttattacatagtttaaggtaatcattgtttatgataatctggtaatttgttatcatgaacatggccaagacttttttcatgtttatcacttatgtatttatgtcacaaccattggaaggtaaagtaactgttttattttatctgtatacagtgccaatatttttattaccttaagtgaaaatttaaacttcacatataaaattctgttattgaaaaggaaatacatatttttgtaaaatttaaatggtgtatcttttctgatggctataagcctcattgccttcactaaacgtcccatgtgcatctcaaactcagctgtccaaaagcaaacgtgtcatcttcttcatcccttcccccagcctacttttttaaatgtgtacctttttgacaaatggcactcagttgcttactctagaaacctctctcacgtatttcatctgattaccaaatcttgccaattccatattatgaataacttagtccatttgtttctctctgcccttagcatccttactgctttctagctccatgatttagcacagttgaaattctttcattaaattttccaagttatttcttgcttccagccatctcagatattattattattgcctgtagcactatcctttcctgctctgatgactattactcttctttcagatatcactttttcttttttcttttttttttttctttttttctcttgagacagagtctcgctgtgtcacccaggctggagtgcagtggtgcaatctcggctcactgcaacctctgcccctcaggatcaagcaattcccgtgcctcagcctcctgaatagctgggattacagatgtgtgccagcatgccctgctaatttttgtgtttttaatagagatagggtttcaccatgttggccaggctggtctcaaacttggcctcaagtgatccgtccgcatcagcctcccaaagtgctgggattacaggcatgagccattgcacttggccagtatcactttttctatgaaacttttcttgtctaggtgaggttccctctgctaagcttctgtagcattttaaactttcctattataacacttatcatattgtgttgtaatgtcccaggctagtcagtgagttctgtgtggtctgacatgatctgtcttgttcatgcttatatactgaggacctagcacataaaagatcttattgaatcaattaattagtcctcctttgaaataaaatataaattacaatgtaagttctcactttttttaagataacagtttcttttaaaagcaaaagaaatcctattaaattccttcagaaccaattttgtgttaggtactgcccaccagaaccttatagcatagtgggagacagacacataaacaagaaggaagaaggtgtgtaagcaagaatgcctgggactgaggggagatatttttgtttgtcagagtcagagcactttttccgatgctgtttggataaaaaatcacaaagaacaatgcttgctgttgtggactacatgagaagacaaaagaggtaatgtaatgagtgttgcttcttacgtttaggatctagagtgtaacttgttaactatcggctgaattttaacatgattattttaggtgaaggtgttgcaaagtgttatatttaatttgtgtgatatttatatctccttgcagtaatccatattcaggatagcagtttggttaaatcagtgtcaagaactctcaattctagtaccagctgtaccagtaaccatgttacctttgttaaattatgcagccttcttggctccaatttatttcatctatgttagggataggagcaagtgtttttccaagttacatttagctgtattacccctctttttacttttctctttgctttagttctaagaagtaaatagagttgtgtaaatgtcttctttatgtatctttattttaagatgtaagtttctttactgtgtgcagtggtctcaaaatctgtggcaatactgtgctgtgacaatgtttattttcttgtttctggtaaattgttttatagtatagtatctttgttcctgttatttctcatgagatttttaacagtgcatacagaaattgctagaatggatggtctgactgatgagtactgcttgagagttgaccagaactctgaagaaatagtgtagtaggcctataatttgaataggtaggaatcgatgtctcataagtgtgtatggtggtggtaggggtggttggtaaagaatgagagggagaggtgagtgaaaaatgaaatgtttttaagcctaaatgcattaatatcttaaaaaattaattcctatgtagtcttaaaccattcttcttctctagtagaaaaagaagttttatgcttttcagtgtctttgcttctggttattttaccttagagttttataccagattatcttctgaggaggcctatcagaagctttaatgtagtggagagcatttgttttcttggtgttgggaggcagttttacctttgagtcattcatttcagacttaccattggggtagaatggtgttgacattagcaggagttggagaagataaaaattcttcatattccattttaatgctgaataagatcctgaagaatattcctggagaaagtatgaatgggatatagaaaaacgggtaaagacatgcattcaagtccaagcttgtgctgtgtaaaaattacttgttatcctgtacagtatgttgggcaaaaacaaagaacaacaataaaacaacaacaacaaaaaaattgcttgctgtctttgaacctcagtcttatcatctttcaaaatcagaataatgtctgtagtgtcttcctttccatggggaaattatttcacttctctgaacttaacattcatcggaaaattaactttagttgagtgcttgctgtgtagtagggtgtgccttattcatcagctttgcaggcattatttaattgttgcacccattctccaaggtccatgttgttccagcatttgcaagtaaggaaactaggaaactgaggtttaagaagttaagttgctgaagatcacacagctggtagtaggcaatatagctagatttgaacctacctgtattgtacttcaacactagtgctcttaagcactaccatgtcccatctctacaatgctagttttgaaaaagatactatctatggtccctttcaatcttgacctacctattaacacagtggaagatttttattaagtaactcaacctaggcaatacattaaggagaaaataagtcacaataggaaagacatgtatttgtgtcttagatgaaacaatattttttattaaattgactgttttaaagtgtgtgttggggggtgcttgtgtgcatttgtattagctattctgtgtatcctattcttagtctgtggtacatggatttcttggtagagagcagatatgaaccccaattttgtatcaggtgatagtctacaggttttatcagattctctgataggtttgagggaaaaaagaaaaaccaaaaagattaattaaataggactcttcagccatgttatcttataatgtttataggtatatattggggaaatgtggtttttgggaatttgtaattttctgttaagcagtcactaccattgtattctatatcaacatgcttttattttgatattgaagtttaaaaaagtgaatgacattatatctcatttttctttagaccttcttcaggaacaatttttaatgatgctttctggctggatttaaattatctagaagttgccaaggtagctcagtcttgtgctgctcactttacagctttactctatgcagaaatctatgcagataagaaaagtatggatgatcaagagaaaaggtaatggaatttagaatttttggtttttaaaattaatgttggcattgtctcaataagggtatatagtaaagatttattttgcctcctgttccccatttaaaagatattttagatagaaattttgttttaaagtgaaattataataaatttttaaaaaggaatatgtaattcctgttctgaaataataggaatgcttattacttaggtattataaaaatttaacagatagcaaattcctataggacagagtccatacttaattttctgtatattccccataatagccctagcattgagaacttaatttaagggtgataaatatttttcaaatgattaaattatttcctaacttcagtcagattagatttaccactaatttctaaactattcaagattcattttggatataaaatatccaaaattataatccaaaatggctataatgtgactgatttatttctgtgactaattaagtttcatttctttatctacctatatttctagtgaatttaattcgctttcctctgactgagttagaactgtcataagaatctaataaatatactcctagatcatggggaagaacaaaaaataagaaagtaagagtaaaaaataaagtaaaacactttattatcccaactgctcttttcaaatgtttgttcgtttgaaatggcctgggtctcattatttcgcccaggctgtggtgcagtggtgcgatcatagctcactgtagccttgatcttccgggctcaagtgatcctcctgcctcagcctccaagtagctgggactataggcacacaccactgcatccaactcattttttttaatttttatttttaatagagacaagatcttgctatgttgctcaggctggtcccaagctcctacgttcaagcagtcctcccacctcagcctttcaaagtgctgggattacaagcatgagccgctgcacctggtcccaaattgttttttaaagcggttatacccatttgtgtacagaaatgtagttgataaggaagtggatcggtaggaagccttatatttgaagaagggtgccaaagtataactgttcctagtttagttaaaaaagtaaagaaggttgggcacagtggctcacgcatgtaatcccagcactttgggaggccaaagtgagaggattacttgtgaccaggagactgagaccagcttgggcaacatagtgagacctcagctctactaaaaataaaaataaatcagctgggcatagtggcctgcacatgtagtcccagcaactcaggaggctgagggaggaggatcgcttgagcccaggagggagaggctgcagtgagccatgattgtgccactgcactccagcctaggcgacagagcgagaccctatctcataaacaaaaaaaaaaaaattaagaaactggaatatgtatataggtaaatattagaggcagtatcacttatgatagtatttattttatgtactagattattactgttatagacaccacagctgtcatggttttagaattgaagttacttacagaactgaatgttatatgtataaaatgcataaagttaaggccttgaagtaggcaaatctgagttctaatcctgactgtcaaactttctagttttatagtcttggtttaagtggatcctactgatctacttccttttcaatagttaatatcagatgtcttaaatttatatctgttaagtattaaattctgtcttattgtggtctttatttgtgtgtctgtaattattgattgggttgaatttcaggtgaaaccactgacagagtatatagtacctgaattggatggcatctgctctatttttaaacaatccaatctctttataaataatcatatttttgcatataggcttcccatatgtagattattcttaaaatataattttcattcacaaattccttttccatcctaggtataaatggtattatgttttaaagtataagtgatttattctgttttgtttgccaccttcattagtttttttctgtcaaagtctatagtatatgtattcaggagcttccaaatagtatgttctcattaaaagaggtgttcttgtgacaaacagaagtcttgcatttgaagaaggaagccagagtacaactatttctagcttgagtgaaaaaagtaaagaagaaactggaataagtttacaggtaaatattagaggctctattatttatgacagtatttatctcatactttgggttattttgttatagacactgtacagatgccatgtgatttttaaactgaatttacttactggactaagcatcatatatataaaattatggtctgaagcttaagccttagagtagacagacttgagttctaatactgactctgccacttcttgagttccttatctgaaagacgaaggtaaaaccacctgtctcagagtttatgccatgcattttctgccatagcaccctgttcatttcctttatagcacttagggtttataattatatatttatttgtttgcttgtttattgtatgttacagaagaagcagattgcctcttctataaatttcttgatatccattcttaaattggctcatgttactgtctgggatgcttgccgaatttctttggtcaactcattcctccacaatgacaatttcagcttctccattctgcttaaacctctcatcttctcttctatgccgctgctttcagcctgcctcctacttggagaaaatagaaggcatagagaggaaatctcgccacatcccactctcaaacattgaaatctcctggcatctcctcctttaataatcttccgtcatgttacagaaacagtttatccttctatttgagactaattcttcctgtgctttgtttttttatctgctctttctcaggtgctttattttttaatatgctgttctccctctgaactatgttctgaacattttaaaacctctcctgtttaaaaattccctttctcacaaagacaaaataatttccctcttccctatgttctcttttaggtatcaccctctctcttccttcctctcacagacaaactttgtgaaagagttgtccatatttgctgtctgcatttcccccccttccatttattccagtaaaatagcacttgctaatgtctctcataaacttcatgttgctaagtctggtggtcacctttcattcttccttttccttaatgttttattaatacttcacatcatcaaccatgccttgcttgaactgtgttctgtttacctttttgatccactctcctgatttttctcctttcacttttgccttcttcataggctcctcctctctactgagtttttggaatatcgtgtgtgtactaagcactgtgctaagcatgggtactgaacttttctactctgaggacttgatttcacgttatgaatagaaacatttgagttggaactatagaattatgccaatataaatgaatttgtgtgtagaaaatatttcacagagcaagcaccatataggcagttcaattgcttgatcaattttctatgcagtatagttcctagttttttctattttattttttttatgttttcatttttatttaactgagattgttttaaacagaatatatcttttctgtgtaaattttacaacaaagatttcagtaaccaaactactttatccatatcaaattttaccaattccaatacagttttgtgctatttttcaaagaaaaatccacgacctttattcttaccaaattgagttttcaagagtcagactttgtaggactgtattttctaatgtacagtttttttgtttttttttccagacaggatctggctctgttgcccaggctggagtgcagtggtgcagtcataacacactgcaagctctgcctcccaggctcaagccatcctccaacctcagcctcacaagtagctgggactacaggcatgccccaccatctccagctaatttttgtagagatgggtttagccatgttgcccaggccgatcttgaattcctgagctcaagcagtctgcctgccttggctacccaaagtactgggattaaagatgtgagccactgcacccagcccatgtacagttttaggtgttgacaagattgtttggttttgtttgtgtgatttttttttttttatgtgatataagcctggtaggtcggtacttatttcttatctaattcatgaaattgtaggcaattcttctcgggtagactacagtcctcctgttgtctaggaccagtctactgtgttgctgatccaaatcattagtatatacagttgacccttgaacagtgtaagggttagaggtgctaaccccctgtgctattaaaaatcagggtaaaactaaattagtagtcaaaagttaactactaatagtctactgttgaccagaagccctaccgatgatataaacaacacaattttgtatatgtattatatactgtattcttaaataaagtagcttgagaaaagaaaatgttattgagaaaatgataaggaagagaaaatgcatttacagaactgtactgtgtttatcaataccgtaagtttatatcatctgtttacaaagaatcatctgtctgaaattgtaggcaaccactgctggttgatatgtactttaggcctcaatctacagaatgtatcaaacaattcacctttttcttgtaatggcatgacttttctctgcatcttggaagcacctccagccactgtggtgttaatcaaggcttatagtattgcagtaaacacagtgaaaaaatacatgagaacctggagagattacttttcatttctggatacaatttactagagaaatgaactgctcatgtggaaattattagtgtcacatggcattttaagcagatactcacaacacaataatgcttaccacagtagcaactgaggtagctgcaaaattattacaatagtacaatatgtacgatagttaatcttatgcaattatgatttaatactgcatctttacatttgtttatatttgtcttaaccacaaataatgctgtgtacagtgtgtgtgtgtaagttttgataaattttaactctttgtaatagatttgtgtatattttatggtagtaaatgatgaaatgtatcatatcaaatgtatacaaatgatggaatgtgtagactagttgtacatttattttatgcattcatgacataacttttaaaaaatttttcagtagttctaaactgtgtggtttgtgaattttttcaaattgtggcaaacctccaaaaagttttcaatatatttattgaaaaaaaaatccacatataagttgtcctgcacagttcaaactcgtgttgtttgaactgtatttcagaactgtatttcagaatcattacattttatttctataacataacatttagagttgggagttacatattggtaatgatacaatttaaaatttgctaaatttatagaccgattttttttccttcttcaatttttgttgtttccatgttttcaggatcttctcttagaaatctacagaagtataggggagccagatagtttgtatggctgtggtggagggaagatgttacaacccattactaggtaaattgcatttttctaaacaacggtatagtaattctgtttatgaaggagttatgtgtgtgtaaaacccaaagctattttcacaatcttttcttatagactacgaacatatgaacacgaagcaatgtggggcaaagccctagtaacatatgacctcgaaacagcaatcccctcatcaacacgccaggcaggaatcattcaggtacattttttcccagatttggtaaagccatcactagtgtagtgctgaggttatttcagtatgttggtggatatttacacagccagataaactctagagataagactagaacttatctgtttttcagaggattaggctaaacattcagggatactcctgaagcagagggatgcaaaaaaaagagaaaaaattcagggagacacaggaaagtcagacaggtcattgacctaaaagatagtgtagatttcttgatcatagtgttgttggataacaacagaagacattgctcgagcatatacaatgtgccaggtagtgtacttactgcttcacatggaaaatcttatgtaaactatttctcatagtttgcaacagagttggtcccagaacctgttgtttctattactggctaatactccttagccattcttccatgaaatattagagccctttgagctctatttttgtgttttttgggaaacattaaacgatattttgggattaaaaaaatgtttttggccaggcgtggtggcttgcgcctgtaatcccagcactttgggaggccgaggcgagcagatcacgaggtcaggaggtccagaccatcctggctaacacggtgaaaccccgtctctactaaaaatacaaaaaaaaaaaaaaaaaaaaaaattagccgggtgtggtggcgggtgcctgtaggcccagctacttgggaggctgaggcaggagaatggcgtgaacctgggaggcagaggttgcagtgagccgagatcgcgccactgcactccagcctgggcaatagagcgagactccatctcaaaaataaataaataaataaattttagagataaggtgtcaccctgttactgatgctggagtgcattagcgtgatcatagttcactgcagccttgacctccctggctcaagggcacctctcgcttcagccacccaagtagctggggctacaggtacacactaccatacccagctattttaaaaaaaaaaaaaaattgtagagacaggtcttggtttgttgtccaggctggtctcaaactcctgggctcaagtgatcctcctgcctcagcctcccaaagtgctgagattacaggcatgagccaccacacccagctgatattttgggattttaaatgatattgtgaactaaaatttgtctaagttaatttgtatctttgctgtttttttctctggttttctgttgatatctttgattacttaacttaaaaacaaaataactcctgtttaggccttgcagaatttgggactctgccatattctttccgtctatttaaaaggattggattatgaaaataaagactggtgtcctgaactagaagaacttcattaccaagcagcatggaggaatatgcagtgggaccattgcacttccgtcaggtaagaaatttgacttgatttttttttttttgcctctctcctcattctaaacaacaactgtttttctcttctatgaatataacaggagttgttttatatatatatatatatatatatatatatatatatatacacacacacacacacacacactatatatatatacataccatatatatagtgtgtatgtgtgtatatatatataaaaaaatatatagtagatgttgcaagctatagatagccctaaatccttcagtaagatagcaataagcagttaatgcacctaggcttgaattttactctcttattccattaggacaacttcaccccacccctaaatatttctaaaaacagaaatatgaaaagggttttcgaaatgagtatcatctcgcatagtttgttggactgaggcatgccaagaaaagtataggcattcctctttctacttcctgctacaaacattttagtcagtaagatagcacttatattggctggaggatccacaaaggactgcttatctttatttatgaaatattttcttttattaaaaaataatacggccaggcacggtggctcatgcctataatcctagcactttgggaggccaaggcgggtggatcgcctgagctcaggagtttgagaccagcctgggaaacacggtgaaaccctttctctactaaaatacaaaaaattagccaggcgtggcagcatgcgcctgtagtcccagctacttgggagcctgaggcaggagaattgctagaacacgggagacggaggttgcagtgagctgagatagcaccactgcactccagcctggacaacagagcgagactctgtctctaaaaaaataaataaaataaaaaaaataatatgcctactcagggctgggcacagtgtggtggctcacacctgtaatcccagcacttggagagctgaggcagatggatcacttgagatcaggagtttgagaccagccgggccaacatggtgaaactccatctctactaaaaatgcaaaaattagctgggtgtgctggagcatgcctgtaatccaagctactcgggaggctgaggcaggagaatgcttgaacttgggaagcagaggttgcagtgagccaagattgcaccactgcaccccagcctgggcgacagagtgagactctgtctcaaaaaaacaaaaaaaacactcagttacccaggaagataacatttataatctgtatataaggtcaccatgttttctgaatgaaaagccaagcacctaatctaataaaggatttcatatttatgtaaagttttttgataatgtaaaccctaaaaaattaattatgtttaagtatgttttgttgcctttgtagaaaaaaaaaattattggccgagcgcggtggctcatgcctataatcccagcactttggaaggctgaggagggtggatcacatgaggttaggaattcaagacaagcttgggcaacatggtgaaaccccatctctacaaaaaaatacaaaagttagctgggcaaggtagcatgcatctgtagtcccagctgcttgggaggctgaggtgaggggatcccttgagcccaggaggtggaggttgcagtgagccgagatcatgccactgcactccatcctaggcaacagagtgagactctgtctcaaaaaataataattattggaatgcctttcaaatatttcagactgtaagactgctataaaattagagatatatcctcatattttaaaaaccttttcctgtgcgagttgattcttgcttgcctctgtaaatcaatatatactattcttctccttcctcttgtatttcagctacacagacctctctgtgttttcttgtcaggccaagctgtttctatccaagggccttagatgtatcttctccttttcccccagttaccatgcgggtggcttcttttcattcggaccctagttaaataataatgtatcttcagagaggcctttcttgattacccattctataatagccatctagccattttgttttgttaccctgttttaattctctgcatgtcccttgttactttccaatacttatttattgtctgttcctccaaaccagcacataaattccatgagagtaaagacctgatctgacttgtccacttgtgaattccccttgtgcctagtgcctggcacataataggtatttattgaataaataaatgaaagtagagcatatttagaaccaggcagagtatctgagtaatttcctttttttctgcttaaagaatttaaatgactcataaaatttgtatttcttaccaaaaattctagaaatgcattttttagaatggagaaatgttaatttaaaaattttgtcctttggtgaagctatttatacatgtatatcttagggttctgtttttaagtatatttttttctttgacttatctcacagcaaagaagtagaaggaaccagttaccatgaatcattgtacaatgctctacaatctctaagagacagagaattctctacattttatgaaagtctcaaatatgccaggtattatgaaaagacaaagttactgtattttaacatttaatgtcatggcttcttttctgaaaacttgagaaacaattttaatgtaaggatttgcattgatgaagagataaagacttggtggctgtgatcagatgtttccttgtaattctctgccctccttcaaaacaaattgtttctgggattccaggttcattctttaccctgacccttcaagaaagttttggtgattccctctttgttctcttcctatacaagtatcctgagaattatatcttgtctcttttggtaattgtatggcatttagtgttctaatttataaaattgtaactcacggttaatacttacaaacttgttttgaggcacaaatgtgatgaggcatgaggaaataattataatggggtaaacaaatgcagcatttttaaagccgtagtgacttaataaatcctatgtttatcacagaaataaaatttactatcatttaagtgcctatgatatgctagccactgttagactcttttcatatgtattctctaatcatgacaataactatggatgtgaaaaaaggcttagagaagtccagtaacatgcccaaagttacacagctataagtgacagaactgcaatttagatctaggtctgtgtgattccaaggtttacagttgatccttgaaccacttggaggttaggagtgctgagcccctcctcctcacacatttgaaaatgtgagtattactttgactcctcaaaagcttaactactaatagcttactgttaaccagaagccttaccaataacataagcagtagattaacacatattttgtataagtattataataccatattcttacaataaagtaagctagagaaaagaaaatgttattgaaaattataaggaagagaacatatatttactagtaagtggaagtgggtcatcataaaggtcttcatccttgccaccttcatgttgagtaggataaggaggaagggttggtcttgctatctcaggggtggcaaggtgggagaaactctgagtgtaagtggaccatgcatttaaatttgtgttgttcaagggtcagttgtattttgtttccactgctattttgtattcactgttgcttgttagtattattagatcagtagcaaagcctatgatgagaactctttaacaacaaatttaaacatttatttccctgaaaacctcttctttattttcagagtgtcttttcttttttgctactagagtaaaagaagtggaagagatgtgtaagcgcagccttgagtctgtgtattcgctctatcccacacttagcaggttgcaggccattggagagctggaaagcattggggagcttttctcaaggtatgtaattcgtatgactttgttatcctaaagtgcagcttttctgttaccaatagtgactttaaaaaataaaaactataggccgggcacggtggctcatgcctgtaatcctagcactttagaaggctgaagtgggtggatcacttgaggtcaggagttcaagaccagcctggccaacatggtgaaaccctatctctactaaaaatacaaaaattagccaggtatggtggtgggcgcctgtaatctcagctattcaggaggctgaggcaggaaaattgcttgaacccagcacaacaggcagaggttgtggtgagccgagattgcgccatggattccagcctgggcaacagagcgagactctgtctcaaaaaaaaaaaaaactatgtagagaccaaatgtgtgtgtttctttccttttatcaagatataagttgattagccctagtgaattgtgcttttattaaacattttccaaaatagtcattgtaaaaatttaagttttaaaaattcagcttaagtgtgcttttctctttataactttttccctggcctaccaagataaaattgtttcctcatgtttttgcatagcatgataacactccattcagttttagcactacattgtattactgtcattttatctctgccttgctaaactagaagctcccttaaaagtgggaaccattctattgtttattgttgtatacctagtgtttttgttttgttttcttttttttctttttatgtttttttgagaccaagtctcgctctgttgcccaggctggagtgtcatggtataatctcagctcactgcagtctccacctcccaggttcaagcgattctcctgcctcagcctcccgagtagctgggattataggtgccccgacaatgcctggctaatttttctacttttaatagagacggggtttcgccttgttggtcagcctggcctcgaactcctgacctcaggtgatccacccgcttcagcctcccaaagtgctgggattgcaggcgttagccaccatgcccggcccccaatgttttctcttctggtgactgataattatgtttagtaaacattcagtggatagtggatgtcagttaatttgtaaaaggtgttcagaaggaattgcttcttataatggtgagagggaaatgatccagggattttggaagatgaaatagtatagttactcaggatgctgtagatctaaattctttccttttatcaagatataagttgattagccctagagaattgtgcttttattaaacattttccaaaatagtcactgtaaaaattcaagtttaaaaaattcagcttaaaagtgcttttctctttataactttttccctggcccacccagataaaattgtttcctcatgtttttgcacagcatgttacactccattcggttttagcactgcattgcattactgtcattttatctctgccttgctactagataaaagaagtggaagagttgtgtaagggcagccttgagtctggcaggatgacaaagtaaagtgttttgggtcctcagtttcctcatttctaaagtcagggatttgtattcgatggtctctaaagccccttttagccctgctattttgaattactattattattatacgagggaagaaagaggatataaatgactaaggtcactctacctttatgcaaaaataaaatttggaatatgttttggaagtagaaaagagaaggaaattttagagtcagaagaaaataataatagttttttcaaaatgacatagcagaagacatacatattaatgtggcttaggaggaaaataaaggaacaaaagtcttttctgctttcattcataagtacattggcagtacttactgccagaaatcaagaaatttttcctctgaatgaaagattatcctgctgaaaagagtacagaattctttaagaaacagtgaatagaatggtagtaaccagaggcagggaagggtgttgtggagggagaggatgaagaggggctggttaatgagtgaaaaaacacaggtaaatagaagaaataagatctagtgtttgatagcacaatagggcaactgtagttaacagtaatttactgtatatttttaaatagctacaaaagaagatttggaatgtttccaacacaaatgataaatgtttgagatcatggatatctcaattacccaaatttgatcattacacattgtatgcttgtatcaaaatatcacacgtacctcataaatatgtacaactattatgtatccataaaaattaaaaataaattttaaaaagaaacacctaaagaataatctggctgtttctttggtagagaaataggaagaagagaagcagagggaaggttggatgaactggtgcacaaatgcttatgctctcagattacattccattcatatacatcaaccaaaacattaaataataacaaactaaatgcagaagcagagataagaattcatctcgttctgttaatccagacattaaagagatttgcaaaaatgcaaaacagtgccatgctcactaagttttgttttgttttgggaagtatacagttgaaattctttatctacaggtttccatctatggattcaaccaaccgcagatcaaaaatatttgaaaaaaaaattttaaagaatagggtataacacttatttacatagcatttacattatagtaggtataatatgtaattagagatttatgtataacctgtgcacattctcctattacacgtaatctagaggttatgtgtaatactttttggaaatgtttaataaaagcacaatctagaggttacgtgtaataggaaaatgccctgccattttaaataagggactttgaacatcagcattatcaaggtgtcttggaaccaattttctgcagatacagagaaactactgtagttatttttcctaaaaattgttatttatgatatatagtagatttattatttttgaataaattaatacattttagatttttctcagtctttctaatatgatatcatatctaatatcagtagatatggtccaacgatcgaaagttctttggggtcttcaataatttgtttgattgtaaaggagttccgcaaaaagtttgagacctgctgtggtagggtcatttagagaggaattgaagttttggttcctagcatttttgttactgttccttccctatcaagcaactaaaagagctttcatttcttagtcatcactttgtcatcttactctccctgcttcctctttcttatttctttcaataaatgtccctgaaggattgggtagtatttcatagttcagttatttgggaaggatactattcatataaactaattgtgcaatatgccttttctgttcctttaataatgttggtaaatgaaacctttgccagatgccagcttttccttcactggattgtgatttttttgacagctataattatgcatcaagtcatccccagtagggggtccctcatttccttgctgacatgtcctcattactacaggcagtattgaagcaggactaaagatggaggcattctttatgataggtctgatgaatatgttcttgtttcagaagagtatttagaagggctgctttttgtaatgtcagagtattaaaaattttttttgatgtttgtcatctgtgacctctctgctaataactcttaagagctctgaccgcatagcattttgtagttttctaaattttgatccatatgtaggattatttacaagttctagtcttgtcactacaaaagttcctttgtattattataatattatatcgtaagttccagaacttacatagtttttttttttttttttttcatttctcttgcttacatgaactctatgtcgtggcattcagatcagtcacacatagacaactctctgaagtatatattaagtggcagaaacactcccagcttctcaaggacagtgattttagttttcaggagcctatcatggctctacgcacagtcattttggagatcctgatggaaaaggaaatggacaactcacaaagagaatgtattaaggacattctcaccaaacaccttgtagaactctctatactggccagaactttcaagaacactcaggtaaatacaatttaaaactatgtcatcttacctcttgactttccttttattatttaaaaaacagaaagcctgagggaaaaagaaatgtcattaagagatagagatctctattaatatatagtaaaaataattgtttaagagttcccattttggaattagatctgacttttaagccttgggcaagggtacttaatcttttctcaacctcaatttcctggttataaaatgagaagatacgtaacttactatattgataacaattcagtgattttatatactgtgtgtatgtacacacagatacacatacatacatatagagagagacagacagacagacagataggcagacgtggggtggggagatgtcatgcagacagagaggtccttaagatagtccctgacaagtagttaagtcctcaatgaatggtagttgctgctttcattattattattattcatggtagtagtatcagtagtaaaagtatttattcccatatgtcattttcatttcagctccctgaaagggcaatatttcaaattaaacagtacaattcagttagctgtggagtctctgagtggcagctggaagaagcacaagtattctgggcaaaaaaggagcagagtcttgccctgagtattctcaagcaaatgatcaagaagttggatgccagctgtgcagcggtttgttttttttattggctggattagtgttttactgttatttaaaaaaacacaaatgtactttaaaatatttttaataacaattttattagagccttgaaattagtaatttattaacaagatattgtaaaactagtcttgaaaattaatttgtaaatgaagtttagaaactttttcctatatatcacaattctatcagtccatcatgtggtcgattcatttaatatatcccagtattaagcctttaacttcctatagaattcaagaaaggtatgtgggaaatgaatgaaatagctactctaaatttgaaatgacaagtgaaaaaagggaagaggaaatgaatgagagaactaaattagaaaataaaagcaagttgggacaattaggttgtcaatccaaatgctttgaaaatatcacatctaatattttatctaacattacctgttggtttttgcaaacttatgttgctacttcagctgtaaacccagcatacacactggataaagtagaggcattggtgtccccaaggtttgtctacagtggtgtcccacagacatgtacctgcttagtgaatatcagctcactgtgctttattatttatttatttatttattttttgagacggagtcttgctctgtcacccaggctggagtgcagtggtacgacatcggctcaccgcaacctccacctccctggttcaagcaattcccctgcctcagcctcccttgtagctgggattacaggcacatgccaccatgcccagctaatttttttgtatttttagtagagatggggtttcaccatgttggcaagactggtctcgaactcctgagctcaggcaatctacccgccttgtcctctgaaagtgctgggattacaggcgtgagccaccacgcccggcctttactgtactttttgatgttgggcactcattgtatagcatcttctgttattagagaaatcattataccaaagcactgagtgccaatatgatatgtgtaaatattgcttaatagtattggccctgaagtatgtgctgtctggagttacccaacttccttgtacctcagttttctaatctgcaaattggggtaataatagtacttatttaataggattcttgtgagaattaaatgagttaatatatataaagcctttacaaagtgtctgacatatataagtactcaataaatgtgacttgctccaataatggcaataataataataaacagaggatgatcatttcctacatgggattattaaaatagttgtatggcaaaagcagatgaggaaaaactttttttttcccacccaccaaggaaaaacatttttaacctgcttttttccccgtacatgaagggcagttgggtacagtcatggtaatgcattatattttaagattttgcctttcttatacagaacaatcccagcctaaaacttacatacacagaatgtctgagggtttgtggcaactggttagcagaaacgtgcttagaaaatcctgcggtcatcatgcagacctatctagaaaaggtaagatttttggagcaacccttaagatagttacttagcatgaatatgcttcatcttttcatcaagatcaatatatttccaaagcaaataaaagtatggttttatttttctatatattattactgttgtagctctgtatagtctctagggtggagtgaaacattgttacaaaacaaagcagccaattttgaaagtaagcccaagtatagtatctcttcttcctccttcctacctccactaccagctaccctttcagcaggttgcttctgatcatttcttcatttatgcatctacaaaaataactgattaagaataggcaagtcagcccttgctcttcattagcccagccacccacaagtaaaggcttcaatatactagcccctttgactttcctgtttctccctcttattcctttagattcactaattttggaaatagttacctcactaaataagtgtaacatgaaacacatgatgcgattgtctttcttttcttttcttttctttgagatgaagtctctctctgtcgcccaagctggagtgcagtggcgcaatctcggctcactgcaacctctgcctcctgggttcaagcgattctcctgcctcagcttcccaagtagctgggactacaggagtgtgccaccacacccggctaatattttttatttttagtagagacggtttcgccacattggccagtctggtctcgaactcctgacctcaagtgatccacctgcctcggcctcccaaagtgctggcattacaggcttgagccaccacacccagcctgattgtctttaaattttataaagttctctgtttttgcagagttctttacaagtattagctgtctgggttatttctacactgtcaaagttgttttgaaaagtcaagaaaataccatagttcagggctgtccaatcttttggcttccctgggccacattgcaagaagaattgccttgggccacacataaaatatactaacattaatgatagctaatgagcttaaaaaaaatcacaaaagaaatctcataatgttttaagaaaatgtacgaatttgtgttgggccacattcaaagccgtcctgggccacatgcggcccatgggccgtgggttggacaagtttgcaatagttcatataatttagctagcttttatatgtatataagttaaattttagtgtattaccttaatttgagtgattctttagatgtatttagtatttgtaaatataatttaaattggttgtgttttcttgaaggcagtagaagttgctggaaattatgatggagaaagtagtgatgagctaagaaatggaaaaatgaaggcatttctctcattagcccggttttcagatactcaataccaaagaattgaaaactacatgaaatcatcggaatttgaaaacaagcaagctctcctgaaaagagccaaagaggaagtaggtctccttagggaacataaaattcagacaaacaggtaactaggtttctacaagtgacaattttatgttcaccagttaactgagtgagtgtttttgcatagaaagagtgacttggtctttttatctgatatagttttgagctctaaaggtcggcttaactatatatagattatcttggtcttttgggttcttttcggtttttgttttttgtttttttttttgagacaaggtctcactctgtcacccaggctggagtacagtggcgtgatcactgtactccagctcactgcaacctcgacctcctggactcaattgattctccccctgagcccccgaaatagctggggctacaggtgcacgccatacctggctaatttttgtattttttgtagagatggggttttgccatgttgcccaggttggtctcaaactcatgggctcaaacgatctgcccaccttggccgcccaaagtgctgggattacaggtgtgaggcactgtgccctgtctgtcttggtcctactgtagttaatcacaaattagtatgtaagatattgacgtgttcttttgtgaataattcatgctctgcttctaagttcattgtggagaatatagatattagctttctgttttgcttttttggtttgtttgttggtatcatagtggaaaaggagatagatattgaaattaattacaaaagttacctattttgatgtaattaaatccctttatttaagcctgtcttgaatctgtatattttagtgtaagcagaggtgtaagttagctaaatagcttggggagagtcccctttgtcctttgatgcttaggaaggtgtgtgaattgcacagttaagacaaaagtaagtttattccctttataatccttagaagtttgcttttttccctgggataaaaacccaacttttttcattaaatgttgtatatcatgtgtgattttgtagttctgttaaagttcatggcttttgtgttttaccttaattattctatgcaagatacacagtaaaggttcagcgagagctggagttggatgaattagccctgcgtgcactgaaagaggatcgtaaacgcttcttatgtaaagcagttgaaaattatatcaactgcttattaagtggagaagaacatgatatgtgggtattccgactttgttccctctggcttgaaaattctggagtttctgaagtcaatggcatgatgaaggcaagtgttactcagcccaatattctaccctgtgcttgaaaaacttagacataagccccttgatgtcaggaatcgtgtatacctctttgtattcctagcacttggtccagtgctctacacataagtagcattttgtagttttctaaactttgatccatatttaggattatttacaagttctagtcttgtttctacaaaagttcctttgtattatataagctgacaagctgtaaatgatgcaagtttgtgtggaggtgatagaatttagcttggtcctatgtctttgcagttaccataggagagggtctagaatggggcattagattggaggatttagaaagcagttaaagatgatgtgatcacaggtgggttttccccctgctgcagaaatatgggatttttacaataaattacttttgtaagtagagaaaatatatttttcagaaaatgtcaagacagcagtattgtataagtttttctttgaaaaccttagattatagtgatgacacctaatattaaatttaagttgacaagctatatattgttagtcaatttgaaggttagagataaaatgtttctcctgcaggaaaataataagactcataatagatacagtcaatctctgctgtagtatacactaaatattacttttggcctatggggaaaagcaattacttcattttattgtacactgacttctcaggaatcaagatcacagtcacactcagatcacatttgtcttccttagattttttggaatataaacagtaccaagtattctagttctgaatccagtttaatttaggaccaaatattttgatttaccaatgcattaatctagagtacccattagaaagaccttcagataagaaaagaaatgaaggaaaacaatatagttagtgaagttttgttaaccacttgtgctaatagaggagcactgtcttaaaataacttacttgcttagatgtgagaatatttgaaataccttgtttcttaattttgtgtcttttttttaatggtagagagacggaatgaagattccaacatataaatttttgcctcttatgtaccaattggctgctagaatggggaccaagatgatgggaggcctaggatttcatgaagtcctcaataatgtaagtaaacctgaaaatcaaaccacaataattatttttattctattattactatatattatataaagtatatataccattccctctaagaaatggaaatacaaaattttgtattttttgtcttctcacatcacataagttactcattttctctctctaattcctcataggcctctgcctttttctcacacatgcaggcatacacgctctacccactgcagtatctagacagtaatacacattttaatgttaagcaaaatgaaaaatatggattatatttttttgtttatttgcataaatctaatagttcttttcttacagctaatctctagaatttcaatggatcacccccatcacactttgtttattatactggccttagcaaatgcaaacagagatgaatttctgactaaaccagaggtagccagaagaagcagaataactaaaaatgtgcctaaacaaagctctcagcttgatgaggtatttggattaaacatacgtaccttttagaagtgtgatattcagtctttcctagaatatttctttttaaaatcttgtgttattaagatgccatctaaaatcggttcaaggctggcacggtggctcacgcctgtaatcccagcactttgggaggctgaggcgggtggattacttgaggtcagaagttcgagaccatcctggctgaccgacacagcaaaaccctgtctctactaaaaatgcaaaaaacagctgggcatggtggtgggcacctgtagtcccagctactcgggaggctgaggcaggagaatcacttgaactcgggaggcggaggttgcagtgagccaaggttgcgccattgcactccagcctgggcaacaagagcgaaactctgtctcaaattaattaattaattaattaattaaaattggttcaaaattccttaatatttgtcaaagcataggagataccagtagtagtttacttttttcctcaaagcagttggcaaagtgaaacaatagattttgaaaggcacctaagtcattgacgagagtatgtatctttgatgtatttcatttatgactgttttgtttgtatctgaggaattataatcattccattgtctagatttgtgcataaattctgtttttctctttgtttttctaactctgagaagtttaaatgttgggtagttccttatgtaatgttttttgttttttattaataggatcgaacagaggctgcaaatagaataatatgtactatcagaagtaggagacctcagatggtcagaagtgttgaggcactttgtgatgcttatattatattagcaaacttagatgccactcagtggaagactcagagaagtatgttttttttaaagaagaaacgttactttcttgctgtgttactctctgtagagatatattagttatagagcctaataagtaaatctgcttaaaatcacaaacgtaatccaaaagcttaatttatatctgatggcttcagcattccctggttactttttcacttaatatctcttaatagaactggtaataggtgactacactaaattaattatttgatttcttctgataatcttctggcatacatacttattacagagaattgcataatagaggcaagtctattaaaataattgaataactgaacatttctagcctcaaaagtttttttaaacgatgtggttactaaaactgccctgggacttaaaaacaaaaaaaggctttaccatttcttccataggtgctaaaatgccattatttaattattattcttgctgtgtcagttcaaataattacaagctgctatataatctttggttttgtgactagtctctaagtatgcttctaagtatctccccatactttaataattgtatttttttctattcagaatcatatcttcaagtttaaattcttattacttgaaaacgaatgggacttcacatattgtttctctaagcaaacaaaaagtattgacatgtcttttagttgcatttaatggtaatgtgacaggagtatgttatctatgtactatgcaaactattacgtaattattttaagatgtttagtctggttcctcaggtggaatctggtctagttacccttgtcaggtaacctgcaaatttacttgaagctacattaaccactgttgagctttgactctgagctgcatagtggccaaagcccagagtcttcatttctcaatcagagcctgaaccacagattagcaacaagttggggccagtggtatctgctgactattcctgcttgaccttcaatgctgttcctcagtttgtcactaaaatctcttcatttttaaatacagaaggcataaatattccagcagaccagccaattactaaacttaagaatttagaagatgttgttgtccctactatggaaattaaggtaatttgcaattaactcttgattttttttaaactaaattttttttattagattgaaccatttgaaatagtatttttatgtaggtcaaaattggttaaatattggcaaatttcatatgtttcaacctataatttctcagtattatatttcctttgcccaagccctaaaatactcaaaagcttctcctgctttcttttccattgccttctgttctacacctcccatctttcttatgaaggtctatagactgttactttcattggccagaaggagagtttccgtgtgcttatgccaagattaatttttgacttggcaaggaaggttccaattgtcatatattgtttttaaaaattctatgtgcagtaaaatgtattggctgtgatatatcacagtattaagtaatatagtatgtattattataatattaagctgacttcatatgcatgatacacttagctctgttctaatattcttttattgcaagaaataatggaagtaatttcatgtgggcagggatatatgtaataagggttataagtttagaaaatgatcatcttaaatacattgtctttcttttcattttgcagtttagtgcttagtatctagttacttgatttgaaatgtagctgtatcatgtggattaactgctgtttttctagctatatcagctaggtgatttcgctgaatgtttccttaaaatgccagatttagcagttataacccagaaaactccttctactgttttccaaaatttactttatgttttcgtgaggagttatttctcagatgactttacatatattagtgaatctttgatgaaacagtagttaaagttacgagcgtgagccaccacacccggcctaaagttgtagttcttaaccactatcacatcgtcatttgtttctctgtttaatattaaaattgccatttataatgtatttttctttaagtgcaaatagtgtatctgacctattatcaatcatgtttatacttttattaggtggaccacacaggagaatatggaaatctggtgactatacagtcatttaaagcagaatttcgcttagcaggaggtgtaaatttaccaaaaataatagattgtgtaggttccgatggcaaggagaggagacagcttgttaaggtgagccttcccttctctggcttagcccttagagttttagtgatgaaaatttttagttcatattttctttctgctttatttgggattttgtctttattttgaatacttacaaatgaggaagatttgtagagtagaaatgcattattttctagaaccaggcttttctccattttttttgtgtctctgaaagacaatcattattatatggttgattcaagtaaaagaataccattaacatgtacagacatgtacagtgaggttgcttcttatgaaaaaaaatactttggtgtctgtctcttatttccttgaatagtgcaagttgacgtcctttgcatcagtataccgggtctcgtactgtgccaagtgctatttaatgtaccaaaaagggagagcattcttcccttaccatttgctgacgagctctttgggtcctactggggagtggtggaaagacacagtgctgttttactcaggtgtttgcagtatgccttcctaggggggacttccagttaatctaattacagaagtagcgaggggaaactttctaaatcagtgtaaatgttgtagcttattctaaatgaaagaatggcagtaggtatttaattatttgggagactgtcaagaggtgcacagatgctcagattggtttgagtgccctttgctattctcagatgactctgtgtttttataataaaataaactgtacttgtttattcatgcttaattattctgaagggccgtgatgacctgagacaagatgctgtcatgcaacaggtcttccagatgtgtaatacattactgcagagaaacacggaaactaggaagaggaaattaactatctgtacttataaggtaactatttgtacttctgttagttcaccaaaaacatataaaagatgccatttggttgggtgaagtggctcatgcccatattcataatgctttgggaggccaaggtgggaggattgcttgaggccaggagttcgagaccagcctcagcaacatagtgagaccccatcttgacaaaaagttaaaaaaaaaaaaaaagccagagatgatggcatgtgcttgtagtcccttagctacatgggaggctgaggtgggaggatcacttgagtccaggagtttgaggctgcagtgagctcaaactctgcagtgagccccagtccagcctgagcaacacagcaagatcccgtttaaaaaagaagaagaagaagaagatgccattatttggaccaggagtctacaaatgttttctgtgaaggaccaaataataaagatttattttctttgtaaaaagtatttattaatgttaattatagttaggtgtttcttatagtcaactgaagtattttttccttttttttctactcaacaatatgtcacagaaatctttctcattttttaacagctgcattgtgtgtatgtatgtagttttttatacaagtccttatcgatgggcatttgtgttgttttcagtcttttgctgctacaaacaacgctgtattgtagtgaataaccttgaacatacaaatttcatacatgcgcaggcaaatttgtagcatggatttccaaaagttggattgctgggttagaggatacatgcatctgtaatctggtacatattgccaaattactctcaatgggagtgtacccacttacatttcctctagctatttgcctgagaagacaatcctcagtcacattctatgagctgatcatctttgactcttatattaattattcatttaaccagtttagaaataacaataaatccttattttgaagggcctattttccataggtttgtcttttgtgatttcattcctgtacctcatttttaaactttctccttctataaatgttgtaacagggactatgggtgacatgtgcttttttatatatttctagttttccactatgaacgtgttttatttttaaaataatggctaaattaaaagccctaaataggggagtgaagaagaataaattagatctaccctccaaaatgctgcttgagttaggctattgtaataaaaagcagaacttggttttgagcttcttaactgctttcagagactaaatataaaacttattggttgggagaggggcatactgttcattaaggaaagcacaattttttccgtagccttcaagtttgtgagaaatttgtgacatggaaccttctgcaataataactaacataatagatgttttccattagcagtttaaaaagctaattaatcctcgatgaatgcaaaaagcaaaagttgctctataaaggctactctgtagagggatttctttgatgtggttaagatcattggtactcaagctttagcagacatcatagtcacttagagagtttgttaaaaacacagatttctgatccccattcttagaatttctaattcagcaagattagggtagaacctgtgaatgtgcgtttctagcaagataccagttatgttgatgctgcactggtccagggacaacactttgagacccaccagtctacttgttctaccatctattgacctgacttcattttagaacaaagttgatgatctattagctatctcctatctgacagataatgtagagattgctaagaagtttttagagactagatattctgtaatgtgaatgaaaggaaattgtttatgctctaaataccaaacttttagatgacaaagataataggtgaagaattgggttacaaaagtatgggctataggagcacctcctgaactctcagaaagtagctaagatttccaagcagatacacaattgaacctccaaagttcattgctgtaaagcacaaaaaagcaaatgcctgacctagaatatcttgaaagcagaaattactgaactttcatctctaccttatgactttttcaacagctagttttcacacaaaactattttaccatataagttattccattaagatttctagccgggcatggtggcccacgcctgtaatcccagtacttcaggaggccgaggtgggcggatcacttgaggccaggagtttgagaccagcctggccaacatggccaaaccccatctctactaaaaatacaaaaaaattagccaggcgtggtggcacatgcctctagtctcagctacttgggaggctgaggtgagagaatcacttaaacccggatggcagaggttgcagttgagccgagatcacaccactgcactccagcctgggtgacagaccgagacttcttctcaaaaaaggaaaaatgtctagaggccagatgcagtggctcatgcctgtaatctcagcactttgagaggccaaggcaggaggatcacttgaggccaggagtttgaaaccaacctgggcaacacagcaagacctcatctctacaaaaaattaaaaatttagccaggcatgatggcatgcacctatagtcccagctactcaagaagctaaagcgtgaggattgcttgaaatcaggagtttggggctgtgcatgagctgtgatcatgccactgcagtccagtctggacaacagagcaagaacttgtcttaaaaaaaaaaaagtggggttggggggtaacccagataattaattatttaatgttatacatctcaatattaaagtaaaacctgtaaacacaacagtttaggtttgactatttcttagaattacgacaataagccagtaatgttattttgagattactccaagaatgtgaaagttgtgtcatcattatgttaaactaagtgttcttgcctttagttaaggttccctagactacagcgaagtagtctacccagtccagtcatctgtagagtcattcccaatcctgagattcaggtcttctgtggtcattgtgtcaacaagagcatacattgactacctggaactagatcttggtatacaaaccttgtgtcattgtgcaacctcaaaaggagagacttgtatattgaggcatgccagatatctcttgtcagagagaatcagatggaaatgaagacagttcttattgtgtatgttgatagctcagacatagcccttaacattaaccagaattagggtggctggccccatttttctccaccaaaactatgcattgttacaaagtatactgaacaagtctaaaatcttaggtgtcagaggatttgttttctaaaaggcaagtctctaataaacaatatttaagtgctgaaaggagctttgcacttaacctgatcatcctgccttgtgccaataaataatttttattccttgtcatgcatatttcagagcatctatctcagtcatggttctggggagagaagccataatatcttaagacattcactgaatataatgaattaacttcatttctgtgtatctaggatgatatcagctgtgtactttcagagaactgagaaaatagtcatcagtccttttttgtggtattcacacaaaatacccagatacccagttgaaatcttccagagagtctttagtaccagagaaaacactgtcatttgctttttgaaattcaaattcagctctttctccaacaaccaacatcacagttgagactctaagctgaggtagaaaaaagccaacccattcctttctgtatcaatctctcaacaaaaaataagggtttgattccccctccccgccccagagctagatattgatagagagtaatcaatgtaaaagagactttagacagagtacactacactgcaagaatgttaatgtgatcaagcatcaggggtcacagctaactcaaagacagcaggggagagggcatgtagaatacttattaggcaggaagggaaatcagaaaggccatgagatcattcatttgtttattcaataaatgtgaatttatatacctacgttgggttagatactctactgagtgctaggtctatagaagtagtaaaacattgccctagtccttaaggtgttcacattctaatagggaaaataaacataataaacataattataatgcaaagtgtattgttagagatggtaccaccttcacttggttgctcagactgaaacctagaggctttattttctttttacttttattattatggaaaatttcaaacatacaaaaggagacaataacatcatgaacccccttgtacttgtcactcagtttcagcagttaccaactcatggacaattttgttccatttctctttccaccaacttccttccaatattattttaaagcaagatgtcatatcatttcatctgtaaacatttcagtgtgtagatctgtaagataatgtctgttttaaaaaaccattctcacaatactgtcatcactcctaaaacaattcacaaaaattcctaaatgtcaccaagtaatgggagtcattttaaactcttgtttctctcttctcaagtcttgtctattccatcagcaagtcctattggtcaacttccaggcaggtcactttaccacccctgctattaccaccctacttctgcagtcacatctctgtagatactagagtttaaaccaacagtttacttctgctcttggttttccaaagctagttttattaataactgttagagtgatccttttaaaattgtctaagacagagtactcttattcggtatctgtgggggattgtttccagagccccctgtggatactaaaatcaagtcccttatatacagtggtgtatgaagcatttgcctataacctatgaacctcctcccatgtactgtaaatcatctctgggttacttaaaataccttatatagtgtaaatgctgtgtaaatagttgtactgtattggtttttaaaatttttattttttattgtattgtttttattgaggtttttttggtgaatatttttgatccacagttggttgaatctgcagctgcagagggccagctgtattccattttcctgttcagaaccccacatgagttcacattatccctgaatgacaattctctaagttaagtgatctgcctctgctgttctccctccagccttatctaccactctcctcacactcctctcactttctgcttgtatagatgagtcatctccacctgacttacctggtcttttgcaattgcttagacacaccaatttgtttctgcctcagggcttttctgcttctgcctgcaatgcttttccctcagatcttcacaccagtcactcccttacttcattcaggcttctgctgcagtgttaccctcagaaaggcctccgaccatgttgccattacccactttctctcttttttaaacttaagttttgttctcttatacttattatctaatattatgaaatgtttattaggatatatgttcctcaccagaatgaaactttatgagggcatagtcttcatctgcctttttcccactctgttctcagtgccctagccctgtgtgtaacatgtaatacgcccccaacaaataaatgttaataaattaatcaaatgcttccttaagacacaaaacagttcaacatatgtgagaaacttaaaatttaaaaatgtatagaactaaagacaccataaggacgagtgaccagctgagaaaacgaatataataatgttaattagaacaaaaaggatcattttaatataaagaacaagggatttatatgaagaatacaatgatattcaacttttctagtaatctggaaaatacaaattaaaaccacagtgaaatactattaccctcagattagcaaaatataaaaagcctgacaatattaagtattgcgaaagttatggaataactctactggtgggtatataaatcggtacagtcactttgaatagttatttggcaatatctggttaaccgaggtgaagatgtatctctggctcagctgttaaattcctgggtatataccctagagcagacttgtccaacccacagcctgcaggccacatgcagcctacaggatggctttgagtgcagcccaacacaaatttgtaaactttcttaacattatgagattttttttgcagtttttttttcttttttagctcatcagcaatcattagtgttagtgtattttatgtgtggcccaaggcaattcttccagtgtggcccagggaatccaaaagattggacacccctgcctagagaaactgaaatatgttcacgagtagtttatttcattgcagcagtatttcatggaaatgtggaaacaatgtaaatgttaatatgcagattggataactgttgtatttatgtagtatatagctgttaaaatgaatgatgtagagttaaatatgctcacatagttaggataaaatagtattgaataaaaaaccaaattacagaaatatacatatagtatcctaatttttttacttaatacttacaactatttgtgtacatatagctttgaaataaaaatataccaaaaaatacaagaacatgataaaccagctaacagtcatcttgatggtgggagggacttagggtcagtgaagcacacaagggggagcttcatctcttccccagcaaatgtgagaaaatcctagatttgataaagctgtttaatggataaaagggtatctgttaatatcattttctatactttatgtatgtttataatataattttaaaaaactttcctagtaaagttgcttattttatatttaggagtacattttctctctgtgaagataataagactaaagcaagagtacatgtaatttcaataatgaagttacactaaaattgagaccacattcatgggtaataatttccaagtgaaactccccaaatttaattgatactaaaattttaaggaaagcagttaattcctctcctaactggacaaactaagtatggattaatgacagatgacggtgagtatagttaacaggagtgacctctcagagaatcgtggggattgagtgatgggcaggctctcaaacatctaggcagcaggctggaaaattatattctttgagcttaagtttatttccgattggtttcctccaaggagctttgtcttctatggacagagaaatattaatacaacttgaaaaaaaatgctttgcactgactctgatagctgaatgatcatcaaatgctctttaatggccttttaaaattaaaaggtatttaatctgtaactccaggtggttcccctctctcagcgaagtggtgttcttgaatggtgcacaggaactgtccccattggtgaatttcttgttaacaatgaagatggtgctcataaaagatacaggccaaatgatttcagtgcctttcagtgccaaaagaaaatgatggtgagtgacacccaaaattaaaggttattgtaagattatttaatggcttattaaagctgacagctgtcagatattatagaatacaaaaaaactttaatttcatcaggtaattgtcaaagatactaagtaaaagaaaaactcatcagaatgaaagtgtgtgagtgaaaaaggaaggattttaaactacataatatgtcaacccttgtcagataagaaatgtaaaggttattcaatgtgtgctgatttgttttcaatttgggataaactaattcttagcaaacaaaacactaaaatgccaggcacgatggcatgcacctgtaatcccagctacttgagaggctgagtctgggggatcccttgaacccaggattttgaggccagcctgggcaacagagcaagaccccatctctaaaaaacaaacacagtaaacaacaacaacaacaagattatgaagtaattttttatgaaactgatatagaaaaccttctgagacatttacaatgtcacattggccatctagtctgatattcattcgctgaatcagcaacatttattgtatgttttctgtctaccaggtactgtgctgacttaagacttcacaaatatcaaatattacgactaatcatcataatccttatcctcattttaaaatgagaagttcagagaacttgcccaaggccagtgagctaataaacagagcaaggatttgagccttgtctaaatccaaaatccatttattgttcattttattgtgctttctgtgacatgttttttaaaatgtgtgataagtgctataggtgttgtgatggaagtctgtacagggcacacagggtacagtgtaggtatggaggaggaagtgcttagttctgcctggggtggggagaatagacagaagtagatccaagaaatgcttcacagaggaaaaggtgtgtgagccgagttttgtaaatgagttgtttttccaggcagaaggagcatataagcaaaggagaggagacatgagcaggaaaagacaacataagcataggcttagtgtttgaggaagaaaagatgagattggagcagtaattgttggtcaaaagatggagtgttgctttatgaaatgcaaaggagtttgcaccttatgctataggcctcataagaccctaaaggatagtaatatcagacttgcattttagaaagaaattccgacggcactgtgggttctatttttgagaatgcaaactggaggcatgagatggtctgaactgagatgaacagcagtaggaagggagaatcgtgggtagagatgagaaatatgaaggaggcagaattcataggatttgattgctgattaaaaataaggttggggggcgggtgtggtagcgcatgcctgtaatcccagcacttaaggataccaaggcaggaggattgcttgagcccaggagtttaagaccagcctgggaaacatagtgagaccacatctctacaaaaaataaaaagtcagccaggtaatggtggcacatgcctgtaatcccagctactcaagaggctgaggtgagaggattgcttgagcccaggggccaaaattgcagtgagctgtgatcacacccctgcactccagtccaggtgacagagaccctgtcaccctgtctccaaaaaaaaaaaatgttggagaaaaggagtagccagtgcctcccagttttctgtttggggcagctgggtagatggtgaagctctttactgcattgaagaatagaagaggtgactaaagtttgccagagatgaagtatttgaatttggaagtgatccaagtgaagatgctgaatgggcagcttgagaagcacattaagctaaagcttaataaagatatctgggccaaacagatttagaaatcatcagcacatagatggaagggagttgaagtcggtaagctttgcttcaggtagtattttatggcaagaagatgttggaggatagagatctgagtcatatcagctgccatctatgagggattcttctgttctttctcttttcctgttttctattgcaacccaatgctgtgatgccacctgaggttatctggaactacttaggcatttctgtgtttatttctgcttaagagtacaggattattcaaattagaatttaatcaaaacaagtaacagtcactgtaggtgtgcttcctcccccaacaattaatatggaaatcctaaagggattatcacttgtaattaattgcttccctgtccagactgttagcttcttgtaggtaatgtatcctgttcatctttattgcccctatatctgtcatatttttatataaaaatgtgtatattagtttaattgaacacaatattgaaaaataattatatatattctctatttaaaggaggtgcaaaaaaagtcttttgaagagaaatatgaagtcttcatggatgtttgccaaaattttcaaccagttttccgttacttctgcatggaaaaattcttggatccagctatttggtttgagaagcgattggcttatacgcgcagtgtagctacttcttctattggtaatcttcttgtacatatagtagattgagcactttgttgtttggcaggttttatttttgtttgattcagcactttttctacattctgagttgcagggggatgatagtgatgatgtggttagtaaccaacccatcttcattattaaatcatatgtttcttgttcatcctgattcttagtgtctacctttttataacttatgcagaagagaattctcctacttcaataaataataaaaagacagggttttcttctttgttttatagtgaatatggcatattttctctcctctcaatatattattttctgagactttctttggaaaataatgaaacctgtgataacttatttcctttaattatttttgttcttttgcatataacctctaaatatcatcacctagtgattaatactttttaatagaattttgttttcagaatagaaaccatgagatatatttaaatattttgtgtacaatatatattttgactttttttccctaagaaattagaataggtagatagtatggttaacaaaatcctagagtatgagaactaatgtaaacattagagatcatctaatctatttgttgttttttttttttttaactaaagacaactccctccatcacttacatactataccccaggaaggcagggcatgtatgttttgaaagagttcccaggtaattgtgaaactctcttctacatagagaatcactaatctgatacaactagtttataaacaagaaagtaggcctagttaatgacagagcaagccagacacccagtcattctgattccctacccagtgtgtttttttgtaatgccatgtgatttctcccattagtgcatgtcatcatctgtcttaaatacagaaatgcagttttttggggggatacacacctggtgaaatgaattaatgattaatttgtgttaaatataattcatcaaggagaagaaagtttcactgaagagtgaagagtttatccatagacttctcattttataagtatgttcaataaaaatttgagtacatataatgcacagctttgacccaggtaaataatgggtctcaactttagccacaataattttttaagtactaatattttaaaatgtgtgcctattagtaaagagaaaatttttttagcaaatcatctaggatttgtaaaatgcaatatgcattaaaatagctggcaagatttgagttaaactcaacatggccggttatgcacatcatttaagtaggctaaaaatcctaaactacttaaagattataccaagtcagtggtcttaattgaaattatggctatatattagaaagagatggaatcagtgatttcagattgtttgtttcttttttctccagttggttacatacttggacttggtgatagacatgtacagaatatcttgataaatgagcagtcagcagaacttgtacatatagatctaggtaagtaataaaatctatgtatctattctttttagtaaatatttggtcatcatggaatgttgtttgcctaccaagatattacaaatataagagacagataaattgaagcagtaaatattgggtttttttgttttcagcataaacagttgtcctagaagaaacagttaactctgcctggggtactgagtgaaacttaatagatgaggtgtcttttgagcctggtcttcaagaaagaaagaaagcataattcagacagaagatagagcagattcaaaagaaggaatcagggctattccaccaaaacaaggagtaattttaagatgtagcatgttgtgggagtggtgagacattaaatgtgtctggagtgaagtaagcctgtagttgagtcgcttgagagagagattggtactagactgtaaaaagccaggctaaggagtttcaacttcattgcattaaactataggaaataaatgaaggacatgataatattttattttcagaaatataatttcaggagcactttggggagtggtattggcagcaggaagaaaaattaagggatattgtaatagtttagatgagaaatgatgaagatttatactaaagttgtagaaaccagaatattggatttgagggacatttttgtagtaaactgtaccagtgatattagatgaggaaatagtgggggagtggggcccccagataactgaagcttctaactaaggaatatatcaagttttgtaaatagtaagaaagtgatgaatttagttttgctcattattttgaagtattaatggaatttctaggtggaatagacagtttaatatataagaaagaaagaatatatagcttctatgtatatatatagacagtttaatataaaagaaagagaatatatatagctaaggaatatatcaagttttgtaaataataagaaagtgatgaatttagttttgctcattattttgaagtattaatgggatttctaggtggaatagacagtttaatatataagaaagaaagaatatgtagcttctatgtatatatatagacagtttaatatataagaaagaaagaatatatatagctaagaaatatatcaagttttgtaaataataagaaagtgatgaatttagttttgctcattattttgaagtattaatgggatttctaggtggaatagacagtttaatatataagaaagaagtgtgaatgtaatgtaaagaagtgtgaatgtaatgacaaacttctattaaacagtattaatcactaggtgataatttttagaggttatatgcaaaagaacaaaaataattaaaggaaataagttatcacaggtttcattattttccaaagaaattctcagaaaataatatattgagaggagagaaaatatgccatattcactataaaacaaagaagaaaaccctgtctttttattatttattgaagtaggagaattctcttctgcataagttataaaaaggtagatgctaagaatcaggatgaatatgaaacatatgatttaataatgaagctggtttggttactaaccacatcatcactattatccccctgcaactcagaatgtagaaaaagaagtgtgaatgtaatgacggagatccagaatcttcagcaaatagatttcagttgaagtcactgggctggaggaggttctgatctcacacatcatccgtgataaagagacctaaagatgaaatcataagggaagtgagccttggaaaggctgagccagaaaaaaactgagaagtactcaaaggaagtcaggatcttggaaggcaagaggggaaaatcttttatgaaagaagtagtgctcaatagtatctgatacagaaaggtcagagaggatgaatgctgaaaatagacctttgaatttaacaagtaatcaatcctagaggccttggaagtcccctttggatagaatggaggaaaccatactgtaaaaaggcaaggactgaatggaagttaaggatgtgtagattaagaatgtggaatctgccaggcgcggtggatcacacctgtaatcccaacactttgggaggccaaggcaggtggatcacgaggtcaggagattgagaccatcctggccaacatggtgaaaccccatctctactaaaatacaaaaaattagccgggcgaggtggtgggcacctgtagtcccagctacttgggaggctgaggcaggagaatcacttgaacccaggaagcagaggttgcagtgagctaagatcatgccactgcacttcagcctgggcggcagagcaagactgtctcaaaaaaaaagaatgtggaatcttcctacaagaagtttagaagggaagggaaggatggcagagaaatttgctgcaggaatgagagacacatttggtccttgcttttttaagataggagaggtttaaacctgttagatattgaagatacaggagaaaaacaaaagataattgaaatagcaagggaaatcataaagtacgtgagtctgatagcattggctttagattggaggcatgttagcttttctgctgagagagaaggaaaagtgatgccaataggaaagtcttaagctggagaggaaggagtatgagggaattatatttgctattgtgtttttgctgagaaatagaaagcatgctcatttgctaagaattggagggatggtaactggccttaaaagaacaaataaaattctaaaatttaccatggaaatgagaccaagacctgactagaaagggataaataaataagacatgccaagcagtttaaggggcactttcaatcctaaatttgtagtggagccaatagggttgttgtatgattttccagcagtcctcaacatccttggagcttaagttgtagtttaaaatgggagatgtggtggagggacaaggggacaaggagatttgaagcactgatgagagtaatcaaacttattgtctctacccctgggctgagttagggaaagaagagggctaataaactagaaatctcagtcaaatttgaagactgtttagtaagaataaggggtagaaggagaagaggttttgattagaatgtacaatttacaatgtctaagaagcagttttagcagactcatttctggagtacaacccatatgagtggttcattaagatagaatgaaattgaattccattagaacagagacagtcacggatattatatggttttccccagaatgaattctagagttgggacagaggggaagattgtgagctaggtccatgccaacattcagcgaatgtgagagaaaaccttacaggtttacagagtaaacgtgaagatggaagggatttgttagagctagaaggtggggatctcaacagaggagccagactttatctgagaatgaaaggagagtggtctggaagatgcaaattagaggtaggagtatgccaacctgagtccattcaggtcgtgctaaaagcatctataaatgagaagggtaaattggtacaacccctttggaatattgtttggcattatccactaaagctgactttatgtatatcctgtgacccatcaattccactccaacacaaatgcatacatatgtataaaaatgtttatagtagcattattcataatagcccctaactggaaacaatccagatatccatcataggtagaatggatgaacaaattgtcgtatatttatattctctttgtatataatgagattgaatgaataataacacacaatatagaagactctcacaaatataatgctaagtgaaagattccaacataaaagagtacacatgtataattccatttacataaaattcaaaagctgataaaattaatgtatagtgttagaaatcaggatagtggtgaccctttgaaagaggtgattagtgactggtaggagggactgaaagggggcctctggaatgctggtagagttctgttaacgtggatttgttcactttgcagaaatcccagtgagtcacacttgggtgatttgtatactattctgtgtatgtctgtttggttacctgttgctgcataacaaaccaccccaaaatttagtagcttaaaatcacaatttatttattattatctctcatagtctgttgactgggctcagctggacagttttcacttaggatctctcatgcagctgcagttagcatctggggctggagttatcttaagactcagctgggccagagttcatgattgcttcttcacttacatgtctgatgcttcagcactcccatgtggcctctctgtccacaatagtgtcctggacctactcagcatcttggggctccaaggggaaggaagtggaagttaagggctaggcctgcaacttgcacagtatcacttccatcacattatgtcatcacatagtcatgtcatagggtccatcctggttcttccctgtttctgggactccagtaaccctatgttaggcctttgcaatgtatcatttatactgttacctgctagtctatattttctaacctttttttccttttttctgactcactccttggtgtcagtggacatatccggggaacctggactttcagccctactcagctatagcaagccctttccctattgagtgtcagtggaggccaattggggaatctagtcttctgcccttacctagcagtaacaaggtggtgactcccaaaggcattaaaggcagaagtttaaggaagatcctgagtctcgtaataactaaaaggtgtaggtgtcaattgaaaatcattaggcatacctggaaccaggaaaatctcaactttaatgaaaaatggccacctgtaggtgccaacactgagatgacaatgatgttggaattatctaagattttaaagcagccatcataaaaacactgaaggaacaattacaaacatgcttgaaacaaattaaaatatagtaagtctcagcacagaaataagtagtctcagtatagaagtagatataaaggagaaccagatggaaattttagaacagaaaaatatagtaaataaaataaaaaatttcaactgcagaatgaggagacagaagaaattatcagtgaatagaagacagagccgtagaaattacccaagctgagcaacagaggaagaaaattaagaggaaaccttcagcatctagggctaaacagagttcctagacttgataccaaaagaacaatctttaagaactctcaaaacttaacaacaaaatctacttataaaatggccatgtactacaaatgtgtatagcagctttattcataatagccaagaaccggaaaaatccagatgttctacagtgggcaaatgcttaaacaaactgtgttacatccatgccctgaaatactactcagcaatgaaaagaaacagaactattgatatacataacaatttggatgaatctccagagaattaggctgagtgtaaaaagctattcccaaaaggttacatactgtatgattattccacttccatttatataacatacttgaaatgacaaaattataaaaatggagaacagattagtggctgctagaaaaatagggggtcagagggctgggtgataggctatgggagggaaataggtgcagccgtaaagggcagtatgaaggatccttatgataggaatattatatatcttgactgcatcgatgtcagtagtagtatagttttgcaggacattacagttggggtgaaatggggaaaaggcataagggatgatcttttctgtatgatttcttacaactcgaagtgaacatataattatctcataaaatgtcattaattttttttttttgatggagtttcactcttgtcgcccaggctggagtgcaatggcacgatctcagctccatgtatccttcacctcccaggttcaagtgattctcctgtctcagcctcccgagtaactgggattataggcacctgctaccacacccagctaatttttgtatttttagtggagacaaggtttcaccatgttggccaggctggtctcttaactcctgacctcaggtgtcaggcctcctcagcctcaaggtgctgggattacaggcgggagccaccacacccagcctaaaaattttttaaatataaatatatcatctccattttaaattataccagtagttacttcatttttaaaaatcaccctttaacctagatttctctagttgggttaagaagtagttaggttatttggatttgaggtggatctcacagacagtgacaaagatgaggaaggcagccagagcagaagtaaactactgtacatactagtgttcatagaacgtaggtaacatgtggtttcttgcctttgtaaagttcacattctaactggaaagaaagtaaattagctgtcaaacctcctaacttcactgtattctttactttaggtgttgcttttgaacagggcaaaatccttcctactcctgagacagttccttttagactcaccagagatattgtggatggcatgggcattacgggtgttgaaggtgtcttcagaaggtaagtgatatgaagtaaaggagggaaataatttttgatgtcaaaattacatgggctgggcatggttctttgcacctgtaatcccagctgctcaagaggctgaagtgggaggattgtttgagcccaggagtttgagtccagcctaggcaatacagcaagaccctgtatctaaaaaaatacacacacacaaacacacacacacacacacacacacacacacacacacgggttagagatttgtatagattatagaatttagtgctagaatcgtattccagtgccttatcaatactaaggaaaagaccctgggtaaaagcaataatagttcctcttccttccacccacctgggacctaagcccatgtaacatacatactgttattccaaacctcctctggaagcatcccacctttacttttaacacctctatcctggctgactccttcttaatgatccaaactactattgggtgctcatcactgtgcatatagaagagactacatttttatttataggagcttgtgttctagtataacattgtgctactaaaaaagctttgcagttccttgtagttttcccagcataggtctgtgtactcaacttggattggggcagattgcagtcagtgtaaactaataattgccacaataatcaaagactgagagctgagcccagtggtgcatgcctgtaatcaatagtgttgtgttattcttgtaaatgccaagcttgtgaaatagtcaaatacatatttgtattcatttcaaacgtctaatgaaagcccactctgccaagtattatgctattttgagatacagatatgtagattattaagcataggctcagcatactacacatgagagtatacagataaagatacgttgacaacattggtgtgtaacaaaatccgtatttataatgtgtttgactctagatgctgtgagaaaaccatggaagtgatgagaaactctcaggaaactctgttaaccattgtagaggtaaagtattttataaggaagactttattttttttcttaccaggtagactgtgtatctcatcaggaagtcactgatgtgaagagcactgcttcattttaacatagggggatgtggctgggcagcagaaaggaggagattgtgcacttagccttttcacacatccaaaaatactggtttagaaatgccttcagcccccttgagtttcttggaatgttagagcattgtaagtagtctctagttttcaattcataaatcaattctttgacatttagatattccatatggtattattattttcagaatggtttccattagggtttaagaaaaatcagaaatttatatctcctttttccctgctcaggttcagaactaattagtcagacaaatggagatcaaattgtcagcatcattactagaggaacatggcttaggaatgagggccagactagtttactgctggtgctacctcagtacctctctgctgtcttaactttgggacagctcacctgaatagggtttgggcctgcagagcaaacacatgtaatcaggatcactgccttgtcttgatccagggcagaaaaaaggaagtcaaacaaatttcagtgtctgtgctgttagtacctatgccagtcattcaccaatctggtaagggtatgtgagacaagaaatcaggagtgtggcctccccagggaagcatggcaggtagagtgcagtatgggcttgccacttttccactactcagcttttcttcctttaacctgatttatgttggactggctgcatgttagtattacttttactgcatttaaaaaacattgatgctgatcaaattcaaaccaggtttctagagatggggcaggaatatgtgcatttttaaaaatctctcctactgttcaactaggatatgagaactgtcttaattcattggcattaaccattaagcctgtggtcaataagggtggggctttatcccttggaagatgagtaacagtccatcagggtggtcctgtgtgcacctttatgaaccgaggcatctttatagatctcctttggactgcagatggtaatacagattttgctacaaggagtttgctgaaataggtcccaataatacgttggtaaaattaaatccaaggctgtgctattcccaaggttaaaaatacattcttttttcttttaccgatttcaaattctgttcatacatgttgtcatttgttacagtttgccattggttctgcagtaagaataaatgataagaaaataagcatgatgtgtaacattttaaaaaaataatacatggtaacatggatgcctcaataatgtcgaaattaaactctaaagttatattatcttgcactttttcatgtaagaaaaagagggctgggcgcggtggctcatgcctgtaatcccagcactttgagaggccgagacaggtggatcacctgaggtcaggagttcaagaccagtttggccaacatggtgaaaccccgtctctaataaaaatgcaaaaattagctgggcgtgatggcgggcacctgtaatcccagctactcaggaggctgaggcaggagaatcgcttgaacccaggaggtggaggttgtagtgagctgaaattgcaccattgccctccagcctgggcgacaagagcaagactctgtctgtcttaaaaaaaaaaaaaaaaaaaagcccaaacttttcaaattaaagagtcaaagcagcttaacatattctttagtattttactctacctagtttcagtcagaagggatttttatgctaaggtggatttgggagtttcttccagtacttgtatcctacctaacactcaccagaagaaggtagttcttttagggcctcagaaatcttactagtttaatgccaaactgcttatggacttcactttttagagtagtaggagatcaaatgagagaagtgacagtggccagatcctttgccattgtaaggactttggatttcctttgagtgagggttttgagtctgaaaagtgatttgcatctccacctacaataactgtcacctttaaacacaccctccgggaggaggagccaagatggccgaataggaacagctccggtatacagctcccagcgtgagcgatgcagaagacaggtgatttctgcatttccatctgaggtaccaggttcatctcactagggagcgccagacagtgggcgcaggtcagtgggtgcacgcactgtgcgcgaactgaagcagggcaaggcattgcctcacttgggaagcgcaagggtcagggagttccctttcctagtcaaagaaaggggtgacagacggcacctggaaaatcgggtcactcccacccgaatattgcgctttttggaccggcttaaaaaacggcgcaccacgagattatatcccgcagctggcttggagggtcctacgcccacggagtctcgctgattgctagcacagcagtctgagatcaaactgcaaggtggcagcgaggctgggggaggggcgcccgccattgcccaggcttgattaggtaaacaaagcagccgggaagctcgaactgggtggaacccaccacagctcaaggagacctgcctgcctctgtaggctccacctctgggggcagggcacagacaaacaaaaagacagcagtaacctctgcagacttaaatgtccctgtctgacagctttgaagagagtagtggttctcccagcacgcagctggagatcggacaacaggcagactgcctcctcaagtgggttcctgacccctgacccccgagcagcctaactgggaggcaccccccagcaggggcacactgacacctcacacggcagggtactccaacagacctgcagctgagggtcttgtctgttagaaggaaaactaacaaacagaaaggatatccacaccaaaaacccatctgtacatcaccatcatcaaagaccaaaagtagataaaaccacaaagatggggaaaaaacagaacagaaaaactggaaactctaaaacgcagagcacctctcctcctccaaaggaacgcagttcctcaccagcaacggaacaaagctggatggagaatgactttgacgagctgagagaagaaggcttcagacgatcaaattactctgagctacgggaggacattcaaaccaaaggcaaataagttgacaactttgaaaaaaatttagaagaatgtataactagaataaccaatacagagaagtgcttaaaggagctgatggagctgaaaatcaaggctcgagaactatgtgaagaatgcagaagcctcaggagccgatgcgatcaactggaagaaagggtatcagcgatggaagatgaaatgaatgaaatgaagcgagaagggaagttcagagaaaaaagaataaaaagaaatgagcaaagcctccaagaaatatgggactatgtgaaaagaccaaatctacgtctgattggtgtacctgaaagtgatggggagaatggaaccaagttggaaaacactctgcaggatattatccaggagaacttccccaatctagcaaggcaggccaacgttcagattcaggaaatacagagaatgccacaaagatactctttgagaagagcaactccaagacacataattgtcagattcaccaaagttgaaatgaaggaaaaaatgttaagggcagccagagagaaaggtcgggttaccctcaaagggaagcccatcagactaacagcagatctctcggcagaaaccctacaagccagaagagagtgggggccaatattcaacattcttaaagaaaagaattttcaacccagaatttcatatccagccaaactaagcttcatcagtgaagtagaaataaaatactttacagacaagcaaatgctgagagattttgtcaccaccaggcctaccctaaaagagctcctgaaggaagcactaaacatggaaaggaacaaccggtaccagccactgcaaaatcatgccaaaatgtaaagaccatcgagactaggaagaaactgcatcaactaacgaacaaaatcaccagctaacatcataatgacaggatcaaactcccacataacaaaattaactttaaatgtatatggactaaatgctccaattaaaagacacagactggcaaattggataaagagtcaagacccatcagtgtgctgtattcaggaaacccatctcacgtgcagagacacacataggctcaaaataaaaggatggaggaagatctaccaagcaaatggaaaacaaaaaaaggcaggggttgcaatcctagtctctgataaaacagactttaaaccaacaaagatcaaaagaaacaaagaaggccattacataatggtaaagggatcaattcaacaagaagagctaactatcctaaatatatatgcacccaatacaggagcacccagattcataaagcaagtcctgagtgacctacaaagagacttagaatcccacacattaataatgggagactttaacaccccactgtcaacattagacagatcaacgagataaaaagtcaacaaggatacccaggaattgaactcagctctgcaccaagcggacctaatagacatctacagaactctccaccccaaatcaacagaatatacatttttttcagcaccacaccacacctattccaaaattgaccccatagttggaagtaaagctctcctcagcaaatgtaaaagaacagagattataacaaactatctctcagaccacagtgacatcaaactagaactcaggattaagaatctcactcaaaaccgctcaactacatggaaaccaaacaacctgctcctgaatgactactggatacataatgaaatgaaggcagaaataaagatgttctttgaaaccaacgagaacaaagacacaacgtaccagaatctctgggacacattcaaagcagtgtgtagagggaaatttatagcactaaatgcccacaagagaaagcaggaaagatccaaaactgacaccctaacatcacaattaaaagagctagaaaaggaagagcaaacacattcaaaagttagcagaaggcaagaaataactaaaatcagagcagaactgaaggaaatagagacacaaaaaacccttcaaaaaattaatgaatccaggagctggttttttgaaaggatcaacaaaattgatagaccgctagcaagactaataaagaaaaaagagagaagaatcaaatagacacaataaaaaatgataaaggggatatcaccaccgatcccacagaaatacaaactaccatcagagaatactacaaacacctctacgcaaataaactagaaaatctagaagaaatggataaattcctcgacacatacactctcccaagactaaaccaggaagaagttgaatctctgaatagaccagtaacaggagctgaaattgtggcaataatcaatagtttaccaaacaaaaagagtccaggaccagatggattcacagctgaattctaccagaggtacaaggaggaactggtaccattccttctgaaactattccaatcaatagaaaaagagggaatcctccctaactcattttatgaggccagcatcattctgataccaaagccgggcagagacacaaccaaaaaagagaattttagaccaatatccttgatgaacattgatgcaaaaatcctcaataaaatactggcaaaacgaatccagcagcacatccaaaagcttatccaccatgatccagtgggcttcatccctgggattcaaggctggttcaatatatgcaaatcaataaatgtaatccagcatataaacagaaccaaagacaaaaaccacatgattatctcaatagatgcagaaaaagcctttgacaaaattcaacaacccttcatgctaaaaactctcaataaattaggtattgatgggacgtatttcaaaataataagagctatctatgacaaacccagagccaatatcatactgaatgggcaaaaactggaagcattccctttgaaaactggcacaagacagggatgccctctctcaccactcctattcaacatagtgttggaagttctggccagggcaatcaggcaggagaaggaaataaagggtattcaattaggaaaagaggaagtcaaattgtccctgtttgcagatgacatgattgtatatctagaaaaccccactgtctcagcccaaaatctccttaagctgataagcaacttcagcaaagtctcaggatacaaaatcaatgtacaaaaatcacaagcattcttttacaccaacaacagacaaacagagagccaaatcatgagtgaactcccattcacaattgcttcaaagagaataaaatacctaggaatccaacttacaagggatgtgaaggacctcttcaaggagaactacaaaccactgctcaaggaaataaaagaggatacaaacaaatggaagaacattccatgctcatgggtaggaagaatcaatattgtgaaaatggccatactgcccaaggtaatttacagattcaatggcatccccatcaagctaccaatgactttctttacagaattggaaaaaactactttaaagttcatatggaaccaaaaaagagcccgcatcggcaagtcaatcctaagccaaaagaacaaagctggaggcatcacactacctgacttcaaactatactacaaggctacagtaaccaaaacaacatggtactggtaccaaaacagagatatagatcaatggaacagaacagagcccttagaaataacgccgcatgtctacaactatctgatctttgacaaacctgagaaaaacaagcaatggggaaaggattccctatttaataaatggtgctgggaaaactggctagccatatggagaaagctgaaactggatcccttccttacacctgatacaaaaattaactcaagatggattaaagacttaaacgttagacctaataccataaaaaccctagaagaaaacctaggcattaccattcaggacataggcatgggcaaggacttcatgtccaaaacaccaaaagcaatggcaacaaaagccaaaattgacaaatgggatctaattaaactaaagagcttctgcacagcaaaagaaactaccatcagagtgaacaggcaacctacaaaatgggagaaaattttcgcaacctactcatctgacaaagggctaatatccagaatctacaatgaactcaaacaaatttacaagaaaaaaacaaacaaccccatcaaaaagtgggtgaaggacatgaacagacacttctcaaaagaagacatttatgcagccaaaaaacacatgaaaaaatgctcatcatcactggccatcagagaaatgcaaatcaaaaccacaatgagataccatctcacaccagttagaatggcagtcattaaaaagtcaggaaacaacaggtgctggagaggatgtggagaaataggaacccttttacactgttggtgggactgtaaactagttcaaccattgtggaagtcagtgtggcgattcctcagggatctagaattagaaataccatttgacccagccatcccattactgggtatataaccaaaggactataaatcatgctgctataaagacacatgcacacgtatgtttattgcggcattattcacaatagcaaagacttggaaccaacccaaatgtccaacaatgatagactggattaagaaaatgtagcacatatacaccatggaatactatgcagccataaaaaatgatgagttcatgtcctttgtagggacatggatgaaattggaaatcatcattctcagtaaactatcgcaagaacaaaaaaccaaacaccgcatattctcactcataggtgggaattgaacaatgagaacacatggacacaggaaggggaatatcacactctggggactgtggtggggtggggggcggggggagggatagcattgggagatatacctaatgctagatgacgagttagtgggtgcagcgcaccagcatggcatatgtatacatatgtaactaacctgcacaatgtgcacatgtaccctaaaacataaaagtataatttaaaaaaaactaaaaaaacaaacaacaaaacaaacaaacaaaaaaaacacaccctccaatgctttgtgtattttacactcatctacctaatcttccctccgtaaatctgtccgaatttccccaaatcatttggtgtgattgttccaatcttcaagaataattttcccagtgatcttaccacagtaagaccctttctgccttcagctttaggagggtgcttctcaattagcatcctggttcccagtcctctgggacatcatttctttcctctcttggattcatttcttttcttctcttagatttcattgaggcacagtcactatttctgaactgatctccccgcttcctaagcccctccttcagagcactttaacctgggtgtatttcccttttcttttcagtgtatttgtctctcctggccttcaagattttattttcttcctaatggaccattctctcctctaagattttatgtgttatgctaaggaaatatatctctccctctaactcagtgatgcttagccaagagcagttttgtcccctagaggacagttggcaatgtctggaggcatttttattgtcacaattggggatgggagatgaggatagtattggcatctactgggtagaggccagggatgctgctgaacacctcagaatgtacaagttagcccccacagcaaagaaataccccatccaaaatgacaatagtgctgagactgagaaaccctgctctagcttaatcagtctgtattcctttactgtttccaaccacttctgtcttgtcagactgaaacataattttttacttattccagttcctccttaattctaatatttgcaagtatgattcctgacacaagcccttggttttgaagtaatttagatttttcttctacttcaacccaagaaaaccatctagtctgtattagaggccttcattccttttcattagttcattaataaaatatattaatatttcccttttgtgggtgaaactggtttggatctctgaaatctaaagccatgtcagtgcccaacttgaagtcacataggaaaccttgaacttaacggacaagctacatgtaatcaagctcagtttctccacagtatttaatggtcctggaggacactcaaaacagcattaaaaaatagagagattttggttctgctaatctagtacgtgtcctgaaactaaatctgctaaaggcattttatagtcccaacctgcagatttactgagaaactgtatacagatagcagcaaaaaagtgttccaaccttgtaatactggaatgccctgtagaatcattctttatattgtctccacttattactaagatttgtaagcatttgctaaagcctattttttttaaagttctgtgtttataaataccagagcagttagctgttctgaactgccaatatcagaaattcctcatgaactcactttctaaaatttacgacctaaagctacttgctctagccatgtcagttgttttggtatcctaattctacacctaatatatatctcaagattccaaacgcagcaccaaaccttgggttttgaggaggtttcaacaaattatacctttctggatccacccagatttagaactgagagaaaaagagccataggaatagggtggagatcagaatttcagatttgttactgataaaactattggagaagacggcttaggagtgaggtccaaataggcttgctggtgctctccagttcccacatcccaatctataccttgagacagcctgggctgaggaagaattgggccctacaaagcaaatacactaacccagggttaagagtagagagagaaggaaagaaagtgactaaccttttaatagattagtttcatccagtcaggaaacatgggtcaagggatgtcacccctaaccatggaggaagaatgaattcagaatgaaatgagaagcttggagcattatgctaggatagtttcctcaaggaaacatgaagtgtgcatgatgtttgttcccctcccccatcaactaccatgtgactggcttatttgtatgatactggttctactgtttctaagtatgtgattaaaatgtacattgttcttttaatacatatgttctctctgtttaggtccttctatatgatccactctttgactggaccatgaatcctttgaaagctttgtatttacagcagaggccggaagatgaaactgagcttcaccctactctgaatgcagatgaccaagaatgcaaacgaaatctcaggtgagcagtattttaagaaggtcctgttgtcagtttttcagattttcttattcccaaggcctttaaactgttcacctcactgaaacctttgtgtttttgtccttagtgatattgaccagagtttcaacaaagtagctgaacgtgtcttaatgagactacaagagaaactgaaaggagtggaagaaggcactgtgctcagtgttggtggacaagtgaatttgctcatacagcaggccatagaccccaaaaatctcagccgacttttcccaggatggaaagcttgggtgtgatcttcagtatatgaattaccctttcattcagcctttagaaattatattttagcctttatttttaacctgccaacatactttaagtagggattaatatttaagtgaactattgtgggtttttttgaatgttggttttaatacttgatttaatcaccactcaaaaatgttttgatggtcttaaggaacatctctgctttcactctttagaaataatggtcattcgggctgggcgcagcggctcacgcctgtaatcccagcactttgggaggccgaggtgagcggatcacaaggtcaggagttcgagaccagcctggccaagagaccagcctggccagtatggtgaaaccctgtctctactaaaaatacaaaaattagccgagcatggtggcgggcacctgtaatcccagctactcgagaggctgaggcaggagaatctcttgaacctgggaggtgaaggttgctgtgggccaaaatcatgccattgcactccagcctgggtgacaagagcgaaactccatctcaaaaaaaaaaaaaaaaaaacagaaacgtatttggatttttcctagtaagatcactcagtgttactaaataatgaagttgttatggagaacaaatttcaaagacacagttagtgtagttactatttttttaagtgtgtattaaaacttctcattctattctctttatcttttaagcccttctgtactgtccatgtatgttatctttctgtgataacttcatagattgccttctagttcatgaattctcttgtcagatgtatataatctcttttaccctatccattgggcttcttctttcagaaattgtttttcatttctaattatgcatcatttttcagatctctgtttcttgatgtcatttttaatgtttttttaatgttttttatgtcactaattattttaaatgtctgtacttgatagacactgtaatagttctattaaatttagttcctgctgtttatatctgttgatttttgtatttgataggctgttcatccagttttgtctttttgaaaagtgagtttattttcagcaaggctttatctatgggaatcttgagtgtctgtttatgtcatattcccagggctgttgctgcacacaagcccattcttattttaatttcttggctttagggtttccatacctgaagtgtagcataaatactgataggagatttcccaggccaaggcaaacacacttcctcctcatctccttgtgctagtgggcagaatatttgattgatgcctttttcactgagagtataagcttccatgtgtcccacctttatggcaggggtggaaggaggtacatttaattcccactgcctgcctttggcaagccctgggttctttgctccccatatagatgtctaagctaaaagccgtgggttaatgagactggcaaattgttccaggacagctacagcatcagctcacatattcacctctctggtttttcattcccctcatttttttctgagacagagtcttgctctgtcacccaggctggagtgcagtggcatgatctcagctcactgaaacctctgcctcctgggttcaagcaattctcctgcctcagcctcccgagtagctgggactacaggcgtgtgccaacacgcccggctaattttttgtatttttattagagacggagtttcaccgtgttagccaggatggtctcgatcgcttgacctcgtgatccaccctcctcggcctcccaaagtgctgggattacaggtgtgagccaccgcgcccggcctcattcccctcatttttgaccgtaaggatttcccctttcttgtaagttctgctatgtatttaaaagaatgttttctacattttatccagcatttctctgtgttctgttggaagggaagggcttaggtatctagtttgatacataggtagaagtggaacatttctctgtcccccagctgtcatcatataagataaacatcagataaaaagccacctgaaagtaaaactactgactcgtgtattagtgagtataatctcttctccatccttaggaaaatgttcatcccagctgcggagattaacaaatgggtgattgagctttctcctcgtatttggaccttgaaggttatataaatttttttcttatgaagagttggcatttctttttattgccaatggcaggcactcattcatatttgatctcctcaccttcccctcccctaaaaccaatctccagaactttttggactataaatttcttggtttgacttctggagaactgttcagaatattactttgcatttcaaattacaaacttaccttggtgtatctttttcttacaagctgcctaaatgaatatttggtatatattggtagttttattactatagtaaatcaaggaaatgcagtaaacttaaaatgtctttaagaaagccctgaaatcttcatgggtgaaattagaaattatcaactagataatagtatagataaatgaatttgtagctaattcttgctagttgttgcatccagagagctttgaataacatcattaatctactctttagccttgcatggtatgctatgaggctcctgttctgttcaagtattctaatcaatggctttgaaaagtttatcaaatttacatacagatcacaagcctaggagaaataactaattcacagatgacagaattaagattataaaagattttttttttgtaattttagtagagacagggttgccattgtattccagccttggcgacagagcaagactctgcctcaaaaaaaaaaaaaaaaaggttttggcaagctggaactctttctgcaaatgactaagatagaaaactgccaaggacaaatgaggagtagttagattttgaaaatattaatcatagaatagttgttgtatgctaagtcactgacccatattatgtacagcatttctgatctttactttgcaagattagtgatactatcccaatacactgctggagaaatcagaatttggagaaataagttgtccaaggcaagaagatagtaaattataagtacaagtgtaatatggacagtatctaacttgaaaagatttcaggcgaaaagaatctggggtttgccagtcagttgctcaaaaggtcaatgaaaaccaaatagtgaagctatcagagaagctaataaattatagactgcttgaacagttgtgtccagattaagggagataatagctttcccaccctactttgtgcaggtcatacctccccaaagtgtttacctaatcagtaggttcacaaactcttggtcattatagtatatgcctaaaatgtatgcacttaggaatgctaaaaatttaaatatggtctaaagcaaataaaagcaaagaggaaaaactttggacagcgtaaagactagaatagtcttttaaaaagaaagccagtatattggtttgaaatatagagatgtgtcccaatttcaagtattttaattgcaccttaatgaaattatctattttctatagattttagtactattgaatgtattactttactgttacctgaatttattataaagtgtttttgaataaataattctaaaagc

SEQ ID NO: 14 - DNA, 61159 bp, Homo sapiens
gtgacgtcagagcaggaagtgtttgaggaagtcgcgccgcgctgcccgcgttaagattcccgcattttaatgttttcaggggggtgtcatagccccgggtttggccgccccagccccgccttccccgccccggggagcccgccccctgccccgcgtccctgccgacaggtgagtccccctcgtgggtgcggcccgggtgccacctgcaggccccgccgccccgctgcctgcaaggcccggaagacccctctgtgccgctgggaagtcgcagcttgcggactggggagcgtttcacttgtgcgggttggagttcgggaagccgggagaaacagctctccctggggtggcttcttgggggtgggtggctttgaggggaacctgcgatttatgggaacattgtaaagaaacacgtgacctcggcgatgctcagaagtaggttctgcccctgccacctcgggcagaaggcgggcaggcccgggcgcccctggtggagtcagctggggatcccctcgctagggcaagggcgtgggcatcgcctccctcggtgactttcttccttgcctgatgccacagcaaccggatgggggagggtgagagggacaaaagtttgccacaaagtttggaccaaccaaacacattggtttctttacaaaataaaaaaccagttgtatttttcttctctcccattcaagagcagtggtatctcttgccttctccatccctttgagctccatttttttcttaatcctaaccttttttccccatcccaaattgcttatagagttagcacgacatcagtatgagctggtcaccttccctgacaacgcagacatgtggggcctgggaaatgaaagagcgccttgggacagggggatttggaaatgtcatccgatggcacaatcaggtaggccctctgtgcagcttggggaggggcggggagccaggccccctcctcactgcctccactttctctgatcctgctgggccaagggctcacctttggctttggtcatcttgggacagtgaatagggggactgggaagagggcttcaggacttctgagctgactccaggttagtggtctccatgctttattgactatgtcacctaaataaatagtaaaataaagttaagctcttagtctctattatatatatatggtaacagtagaatatcatgtactaatatatactgatattatatgttataaaacatatagaaataggaaaatttaaaggatgagactaaataaataatttaaaatattttaattccttgaggccagtagttcaagagcagcctgggcaacatagcaagacctcgtctctacaaaaaaggtttaaaaattaggcagccagctgggcgtggtggcttatacctgtaatctcagcactttgggaggctgaggcaggcggatcacgcagtcaggagatggagaccatcctggctaacactgtgaaaccccatctctactaaaaatacaaagaattagccaggcttggtggcacgtgcctgtagtccccagctacttgggaggctgaggcaggagaatcgcttgaacccatgaggcggaggttgcagtgagccaagattgcgctactgcactccagcctgggtaacagagtgagactccgtctcaaaaaaaaaaaaaaaaaaaaaaccttaggcagccttggtgcgtacctgtagtcccactacattggaggctgatgtgggaggattgcttgtccaggagtttgaggctgtagtgagctatgattgtgccactgcactctagcctaggtgacagagtgagaccttgtttcaaaaccattttttaaaaattattttaaatgtcgggtgcagtggcttacacctgtaatcccagcactttgggaggccgaggcaggaggatcacttgaggtcaggagtttgagaccagcctggccaacatggtgaaacctcatctctactaaaaatacaaaattagctggtgtggtggtgcatgcctgtaacttcagctactcaggaggctgaggcaggagaatcgcttgaacccaggaggcagaggttgcagtgagccgagatagtgtcactgcattccagcctgggtgacagaatgagaccctgtctcaaaaaatatatatatatatatatatttaaaatatttgctaattatgatgtcttcccagtattgcttgcgatactgcacggcaaaaaataagcagatccacatgaaagtgagaattcatttagaatgatgatgaaaatccatatttcaaataattaacatttttttaaattttgtagagatggggtcttgctatgttgcccaggcttgtctcaaactctcatcctcaagcagtcttcccgtctttgcctcccaaaatgtttggattacaggcctgagccatgggacctggcctcagctgaggttttttttttattttttgtagtgatggtggtctcacaatgttgtccaggctcgtctagaactcttggcctcaagtgatcttcctgccttggcctctcaaagtgctgggattacagccatgagtcattgaacctggcctgtttttatttttaattgacacataataattgtacatatttatggggtacagtgtgatattttgatacataatgtgtaatgatcaaatcggggtaattggcgtgttcatcacttgaaacacgtatcctttttgttggaaacagtcaaaattctttcttctggctattttgaaatatacaatatttttttttttccggagacagagtctcgcactgttgcccaggctggagtgcagtggtgtgatcttggctcactgcaacctccgcctcttgagttcaagtgattctcctgcctcagcctcctgagtacctggaattacaggtgtgcaccaccatgccagctaatttttgtatttttagtagaaatggggtttcaccatgtaggccatgccggtctcaaactcctgacctcaggtgatctgcccacctcagccacccaaagtgcttggattacaagcgtgagccactacgtccggcctgaaatatacaataaagttttattcactgtagtcaccctgttgttctttagaatactgtaacttattccacctaaccgtaattttgtacccattaaccagtctctccctatttccctccacaactccccccacccccaccaccctttcctgcctctggtgaccactattctactttctacttctgcgagattagtttgttgttgttgttgttgttgttttgagacggagttttgctcttgtcgcccaggctggagtgcagtggcgcgatcttggctcactgcaacctctgcctcccaggttcaagtgattctcctgccccagcctcccgagttgctgagattacaggtgcctgccaccacacctggctaatttttgtatttttaatagagacggggtttcaccatgttggccaggctggtctcgaactcctgaacttaggtgatccccgccggcgcgcccccccccccccccgccatcccagcctcccaaagtgctgggattacaggtgggaactaccgagcctggacgagatcagtttttttttgtttgtttgttttgttttttgagatggattcttgctctgttgcccaagctggagtgcagtggcacaatcttggctcgctgcaactggtgtctcccaggttcaagcgattctccagcctcagcctcccaagtagctgggattatagccgtgcaccaccacgcctggctaatttttgtatttttagtagagacagggttttaccatgttggccagtctggtctcaaactcctgacttcaggcgatctgcctgcctcggcctcccaaagtactgggattacaggcatgagccactgtgcctggcatttttttttttttaatttttaatttctttggagatagggtctcaatctgtcatccaggctgagtgcagtggtgccatcatggctcactgtagccttgacctcctgggctcaaatgatccttctgcctcggcctcctgagtagctgggactacaggtgtgcgttgccatgcccggctaatttttgattttttgtagataggaggtctgtctgttgcccaggctggtctcgaattcctggacacaagtgatcctcccacctcagcctctcaaagtgctgggattacaggtgtcagccaacagactttacccaactgagatcagttttttattagctcccacggatgagtgagaacatgtggtatttatctccctgggcctggcttaattcccttaatgtaatgccctccaagctcatccatgttgccacagatggcaggatttcattcttttttatggctgaataagagtacattgtgtctgtgtaccacattttctttgttcatttgttcattgatggacatttaggttgattacatattttggctattgtgaatagtgctgcagtaaacgtgagggtgcccatatctctttgataaactgatttcctttcctttggatagatacccagtagtgggattgctggatcatatggtagttctatttatagtttttcttttttttttgagacggagtcttgctctgtcaaccaggctggagtgcagtggcatgatctcagctcactgcaacctccgcctcccgggatcaagcagttctcctgcttcagcctccaagtagctgggattacaggtacatgccaccatacccggctaatttttatgttttcagcagagacggggttttaccatgttggtcaggatggtctcgaattcctgacctcaggtgatccgcctgcctcagcctcccaacctgctgaaattacaggtgtgagccactgcgctagccttgtttgtagtttctcaaggaacctccatactattttccataatggctgtgctaatttacattcccaccaatagtgtatagagttccgctttctccacatccttgccttcatttgttactttttgtctttctgataatagccattttaactgtggtgagatgatatctcattgtggttttgatttgcatttgtctgatgattagtgatattgaacattttatcatatacttgttggccatctgtatgtctgagaaattcctgttcaaatcatttgcccatttgaaaaattggattatttatttttttgctgttgaattgtttgagttccttgcatattcttgatattaatcccttgttggatggatagtttgcaaataatttctcccattccataagttgtctccataggttccataggtttattctgttttttcttttgctgtgcagaagctttttagtttgatgtaatctcatttgtctacttttgcctctgttaactgtacttttgaggtcttatccataaaatcttttcccagaccaatgccctgaagcacttcccgtatgttttcttgtttttttttttttgagacagtctcactctcagctgagacaggtgcgatctcgggtcactgcagcctctatctcctgggttcaagcgattctcctgcctcagcctcctgagtagctgggattacaggcagcgccatcacacccggctaattttttttttttttttttttttttgagacggggtctcgctctgtcgcccaagctggagtgcagtggtgtgatctcgggtcactgcaagctccgcctcccgggttcatgccattctcctgcctcagcctcccaagtagctgggactgctggcgcctgccaccacccccgactaattttttttttgtatttttagtagagatggggtttcactgtgttagccaggacggtctcaatctcctgaccttgtgatccgcctgctcggcctcccaaagtgctgggattacaggcgtgagccaccgcacccggccacgtgtggctaattttttttttttttttttttgcaacggagtcacgctctgttgcccaggctggagtgcagtggcttgatctcggctcactgcaacctctgcctcctgtgttcaagcgattctcctgtctcagcttcccaagtagctgggattacaggcacctgccaccatgcctggctagtttttatatttttagtagacacggggtttcaccatgctggccaggctgttctcaagctcttgacctcaagtgatctgcccaccttggcctcccaaagtgttgggattacaggcatgagtcactaacaggcgcctggcctgttatttatttttaaaaagccaaaagccagcttcctcctcctgccggctgaaccccacacagtctgtctgcacctgcctctccatcattcctccccttggctgcctctgttttgagcgctgagccctcttgccggacaggcctccccctcctccacattcctccaggaccaactctaggccatctcctcctcatatgcgtctgggatggctttgttctgtggcaactggttctcccggtgagttcctctgggctggttcctgtgccgcccttcctgtctgcgtgtggagtaagtcttgtcaggaccctgcattcctggtcagccagggctgggtctggcctttggagttccttcagttctcctgtagcaagtgcctgacgttgtatatgtgctaggtgccccaaatcatccactctgccagtccacaaatatttatcgaatgtctattatgtgtacattggtaattaaagcagacctttggagaagggaaggagccattagtcaactaattataaatgtaagctcctaagtatggtaaagtgtgagttgggagaaggacccagtgcactgagaccttccgttggggtgggatcagtcagtgtcagaggaggttccccaaggaagtgacacttgaactgaggccctagtagaagtcagcttgacagagaaggtgggaggagagttccaggccaagggagaggctcctgaggggcctctgtggagggcaggtgtggcaagtgggcaagactgaaggccagcgtggccggaagggaggatggggcacaagtgcctgggtggctgagggtggacggtgcaagtcagatcctgtggtgttttttgggcagtttcagccgaggaggttttgttttgatggaggagcagtggaacgatgttagagggaggcgctgtgcccatggggacagattgggagggcccaagcagtgggcagcgtgctgggaaaaaatcagctctcggaagaaatgccttgatccatagtgtgcagcagttctcatggagtagctactcccaccagggctgacttcaagccaccagtagtttaatagcccgctccggcctgattcctgagtagttaacaaccagctctcagtgactgctactacagtgtcactggctccgtcccagtgatgcaggcagaccaggtctgaatgttttggagtcgtctaggtgagagatggggagaggtgggcagacttaagagatatttagcctggtgcagtggctcatgcctgtaatcccagcactttgggagcagaggcaggtggatcacctgaggttgggagttcgagaccagcctgaccaacgtggagaaaccccgtctctactaaaaatacaaaattagccaggcatggtggcgcatgcctgtaataccaactactcaggaggctgaggcaggagaattacttgaacccaggaggtggaggttgcagtgagtcgagatcgtgctactgcactccagcctgggcaacaagagcgaaactctgtctgagaaaaaaaaaaagagagagagagatttaaggggtggaattaacagcgcttagtggtggagtagaggtggaggggagcaggaggagtggagtgcctgcaggtcctcaatgatgcctacccgtgagcccggcccaggccaggaagctctctaccttccttccccgtgggttctccccaagtttgggaaatctctagggctgctttgggtgctgaggagaagtctttgatcattgtccaagttcagaagatgagcgtgtatgttctctgttgggaacccctctgttcacagcctcttaaaagaagcagctgggctatggtggtgttggttccttgactctgatggttttactccacgtaacaacagtgtgcactttcctgacactccatgcactgcatcttgtctgcagaagaaggaatgttgtagttatcacaatagaagttacatgaaaaagcccctaagcatgggtatcctcagtcagagaagtggcctgataatcagaggcatcatttactgagaacctgctatgcgccagcatcaaactaggtatttacgtgctttctctccagccctcacaactctgaaaggaagtactgttgtctttgttcccattttatagttgaggagactgaagcacagtctctgtgactcacccacagacctgagctcgcaagcaaagaggctaggattggaacctgcgtctgttcggaacccaacctcatgctttttccattgtgcctgtggcttctctgtggtgaggactcagggggaggccttggtgttccttaggctctcattgttcaccacagtctaaacctttttgaagcaggaaggggaaaacacttctttattgattttttgttgtttgttttttgagacagggtctccctctgtcacccagactggagtgcagtggctcgatcagggctcactgtagccttgaactcccaggctcaaggagtcctcccacttcagcctcctgagtagctgggactacaggcgtgagacaccacgcctggctaatttttttatttttgtagagatgaggtctttctatgttgcccaggctggtctggaactcctgggctcaagcagtcctcctgccttggcctcccaaagtgctgggatttcaggcatgagccactgtgcttggttgaaaaacacttctttggaggacaaaacacttataagtcttccttgttagacagagaaccccacattgagtgtttcccagggagggagggcagtgaacaagcgagccccaccacaacctgcttcccctgttcttgtggttctcctgccacgcgggcctcaccattccacattgtgtcgggactccctaagacctccagcccaggggtcagcacaaaccacttcccagtaccgtttagataggctgatattttcaatgagacctttgttaaatacaaaggaagaggaggaggagataaccgagtgctcccacctggcagcatgttttgggagtgggggcgggaaacacgatactcagtcacacagacctgggttcagatcctggctctgtcagcgtcttggctgtgggtccccactttttgcatggattatggggattctccaatactgatctcctcagtgctgggtccccaacatggctgggcaggatgtgggtcagctaccttctggaagccacccagggtaccttgtgatatcatcatgttctgtgtacacttggctgtgaggagggccaggaagcgctgcctggggccctgcgggatgctcgttggggtggaggaggcagtgtgtgtactggctgttagaaggcagagtattaacgatcccttctatgaagcagcacggacctgtacttgtccctttatgggacaaggcaaagctttccacagcttatctgtgtgcttggaagccttaaagcctctgctccgttcagtcacttctctagggatttatagagcctgggcccgagctctgtcagggataccaggaaaaaagggtccctgcccttcgtgtgcttactctctgatcacagtgatccagggagcattcagaaatgcattaagtgagtctaaatccaagcaccgaactgcatggataacagtggctgccatttttccagggcatcatgtggcatctgagctgggttccctgtccgcatgatctctcccgaacgctggggaagggaggcttcttggggtgaatggagctttagcaggatctggaaaggaggtacactttcgagggcctggcaagaagacagaagccgactcaggtgggcagagcagcatctccacagggccagaaaaggaagtgaggctgcggtcgtttattcccggctccctgtggtcggatgctgtgtttcattttagctgacatccctggagtggatggagccatccccatcttatggatgaggacccagatgcttgtaccatgggcttctatcgcacctttaccaggcggtgggggagggagttacacctggacctgcttgtctcctgagcccgagtgcctggcttctgtgggtgaggcggcaggccactgtgccccttgggggtctgcactgtagggagtagggtgaagaagtcatggccctcttagcgtagaccaggcgatgctggggcccagggtctgtccagttacctgctgagccaggggtgaaactgcagctggatcccggacctttttggctcccagccctgggtcctcctgcccagtctctctggtcccagccctgcacctcctttctgaagcattcatttcagggggtggggtctgagaaggaggaggaggtttttactaattgcccccatgtccacagtggcctggttggatgcttgccatgataacgggacactgggctttctgcgctaagggtctaaacatggctcttggcctctgtgagtttcccctgagtcgctggaagaggcaaacttgaggaagctgggccccttttgtttctcctgtgactgggtcttcagctcgcatctgccaggcaccttttggtctgaggatgtgctccccctctgccttttttacaccttatgacacacatgcttatatataagttttatgtttacatgcatcaaaggcaaggaattgcaaactctgaggaccttcataatcactacattcaatctggacatacaggggaccctttctccgttttctcaaaatacagaccagttttttgttgttttgtgtgtgtttattttttgagacagggtctcactccagtagtccacgctggagtgcagcagcatgatcacagctcaacgcaggtctcgctctattgcccagccttgacttccgagggtcaggagattctcccacctcagcctcccaagtagctgggactacaggcatctactactatgcctggctagtttttaaaaatatttttagtagagacagagtcttgccatattgcccaggctggtctcaaacccccgggctctagcgatctacctgccttggtctcccaaagtgctgggattataggtgtgagccaccatgcccagccacaaagcagttttaagttttgtccttcacgaggagttcatataccagaagttgggtactgagatggcgcaggcctagtctgggtttccacagaactaagctaagactcagtagattccaggaaaaataaagtaagccatccttcttaccttacatgtgtttgagttccactgctagtgaagaacaaactccctggggtttcagaaccggtgatcgtagcctgcttctgttttaattgaattttgctttctagagcaggtatgtttttagtaacaaagtcattctgtttgcatttctgtttcaaatgaaacattactcatggaaaaactgggaatatttcggaatacttcctagaggcagatgaaggccactgtgttaggaaaagtttaagtatgtctgtatctacgcagaccttcctaggcccagggagttaggatttcgcctcaactctagggcgaagctgagctgtctgtgagtagaaagttagttttggtatctatgcccagttatttcaagacttgttcagtgttcacattgctgagttcagtctttttagtttgcatttggatatttaagaccaatatcaagtcttcagtatcagaatctcctcctgattctgggttgggccaagtgacagctgtgtatcaggtccagtgtttgtgttgggcaaaagactgcaattatccaatttgtagctagacagattacctaaaatcacttaataaactaagtcatctaatctattttttggatctgatgatctgtcctgtttcatttatgataggtagaataatcccccccaaccccaccaagaaatctggatcctaatccctgaacctatgactgggtggggcagcatggcaaagggaaattaaggttgcagatgaaattaagttttctaatcagctgaccttagagattggcctggcttccctgggggtcccagtgtaatcccaagggttcttaaacgtgggagaaggaggcagcagagccagggtcagccgatgcatgtgaggaagatggcgggacatggctgacacacggatgggctaaggggctacgagctgaagaaagtggcgcttctagaagatgcagaaggaaaagtagggaaacagactctcccctagagcctctggatggagcatagccccaccaacatcttagctcagggagacccacatcaggcttcagcagatagaactgcaaggaaataaagtgtgttattttaagccaccaagtttgtggtaatttattacggcagcaatagaaaacaagtgccctcttctgtgtattgaagttacgttgctgcagatttttcagtatcttggtttagtctcagtcattctaaggtaacgaaccataagttacagtctctttggctaaaccattgcttggaatagtgtccatggaaatgttgcagggtggatggaggtggatagatgctcttggcaatggcacctcacgctgcagcggggccatcggtctctgtttgtggaaccctgcgttccccacgtctgagctcctctgcaaactccgcctaactggaggcaagtgtctgtagcagtgtctcagtcggctcagtgctgctatcacagagtagctgagaatgggtaatttataatgattttatttctcatagtcctagaggctatgaagtccaaggtcaaggcatcatcatagggtgaaggcgaaagggcaagagacaaaagggaccaaacttgtccttttataaccatcagtcccacctgggatgcagagccattgtggccgaattgccccttaatactgaggtgatgtcctggcgcagtggctcacacctgtaatcccagcactttgggaggccgagacgggtggatcacgaggtcaggagatggagaccatcgtggctaacatggtgaaaccccatctctactaaaaatacaaaaaattagccgggcgtggtgatgggtgcctgtagtcccagctactagggaggctgaggcaggagaatggcgtgaacccgggaggcggagcttgcagtgagccgaggtcgtgccactgcactccagcctgggcaacaaagcgagactccgtctcaaaaaaaaaaaaaaaataccgaggtgatactgctacaacaggaattggctttcattgaattatggaaaactgtggaacttaagccatagcagatatcgtcaggcagagctgctgtggatgaagctaccacagaactgggcaaaaatgtgtctgagcactgtggggaagtgaaacctgaaagcaaattcacgtcagcctgagaacagaccaggaatcgggaggtacagggaggtgtaacatggtctgcacatcaattaaagaaacgttattcttttttttttttttttttttttgagacagagtctcactctgtcacccaggctggagtgcagtggcacgatctcggttcactgcaacctctgacaccagggttcaagcgattctcctgcctcagtctcccgagtagctaggattacaggcacccaccattgcacccagctaattttttatttttagtagagatggggtttcaccatgttggccaggctggtctcgaactcctgacctcaggtgatccacctgcctgggcctcccaaagtgctgggattacaggcatgagccaccgtggctggccagaaatgttattcttttgacacattccctaattcttgaaaagcttgagatggacttgtgtccaccatggtttgtaccactgtactaatcagtttaatagcaacaaggtggccgggtgcaggggcttaggcctgtaatcccagtgcttagagaggctgaggtaggaggaccacttgaggccaggagtttgagaccagcctgggcaacatagtgagactccgtctctacaaaaataaaataaaaataaaaaaaattagctggacacaatgacacatgcttgtaatcccagctacttgaagctgaggtgggaggatcgcttgagcccaggagttttaggcagcagtgagctatgatcactccactgcactgcagcctgggcaacagagtgagaccctgtctctaaaaagaaaaaatagcaacaggttttacaattgttgagagaggtcagctcttgttcagagagcgcctcagaatctaggccaaagatcagggttctactagacaaagagaatgagaaggatacttagggcagaacctggatgcccatgcctactgccgcagactggactgagggggtctcccatagtcacagacgtaagcctgtggctgcaccatgggtgagccttggaaacagtgctcagggaaagaagcctgtcacaaaaggccacatgatatatgattccatttatatgaaatgtccaggacaggctaatccgtagagacagaaagaggtgggtggttgcctaggactagaggggctcggggagtagggagtggctgctgatgggtgtggagttttgttgtgggatggcagacatgttctaaagtgtgccgtggttttggtctcacaactcttgagtatgccagaaactattgaactgtgtaatttaattggatgaattgtatggtgcatgaattattctcaatagagctgttaaaaaaaagtaggcatgcaaggtcaccatctgatggaaagcttagccaaagtggtattgggctttgatgaaagcagcttctgagagtattttagaagtgttgacagtacctcctttctggcatggagtctgctgttccatttccacctttttttctgaagcttttggttcttggtgtcggtgttaaggattggtttattggtcagtgactcagtggtcttattagacagcttctggtgtatgtggaggtttccatttttccttttcttgctgtgaaggtccttgttcctgcagggatcctggccagtttggtaactgtgagactgaggtggcttgagtgccatgggaacagccacactgggaggccttgccacagtcctctgtgtgtctttttttgtttttgtttttgtttttgttttgaaacagggtcttactctgttgcccagatctcctgcaacctctgcctcttgggcttaagcaatcctcccacctcagcctcctgagtggctaagactacaggtgcatggcaccacacctggctaatttatgcatttttttgtagagatggggttttgccacgttgcccaggctgatctgtgtgtctttttaagtcccattcagtaccatgtctgttgctcacttacaagatttatgattcttttcagtttgcatcttcataaactgagaaaacagaaattggcctaacagggcctctaggacatccttcaagtgagccacagtagagtctggtacaatgctgaaatcttctcctactgctgggtgccctgtgccaccctgcaggtgtggctcttgcccaggtgtgtgtgcgggtagggagtttcgtgctgtaggtacacaggaggtgcaggatgttggtgcaggtcagcttgtttagcagtggcaggatcggctctcaggctggggctccgggagctgctgccttgggcagctgctgccccgcagttgtcttggagacccccccatagccaaaagaggtgacagtggtgcagtggtgactcccttgtggcagctggagtgcccgaggccagagccgctttccctgctgcccgtgccacagcctcagggcctgcccgtctccagtgtccccactcatgcaccagggagaagaggggaggccgccaggagccagtggctcagctcatgattcaccaggtggaggagccaccgctgaggatgctgctggttacctcgatagaggttaaagcccatgaagatggacaagtctataatttaacaaagagaagagaaaacagcctgttactctgcagaaagtaactctttggcatgtgcactgaaggaattacctgttacaggagtatagcagagggtgagaccctcttgagctcggcagaccgtggtgcccatgcacctgtgctggcaagtgtagcagagcagggccaagcgccagggtgggtggggccgtctggctgtagtgtcgtgggaagagtggctggaaatgcagataggagccaatctctgtaggatgttaaacaggagtactcggatgacctgggttccctgctctgcagggttactaatacctgctagaggcttgttttcaagccctgaaagatgggtgtcagtattcccattttacagaagaaactgagtcagaccaagtggtttacccaaggtcacacagctagtaaatggcacagttggaatttgaaccagccagtgtttcatctgctatattatgccatattatgcttgcgttctctctgaaaggacaaaactctcacatgaaacaatgaagacactcaatgtggtgttcactattaggttgaaccacatgcaggtgccatttttgtaggtcaatgtggtcaattatcagcagtgtcccatgggtcagcctaatacagcagcagccggggttcggacagggaaacctctctgcgcaggaatggtcagtagaggtttcatggcggagctgggaatggagcagggccttgaaggctctgtagactctggatggatagaaatgaggtgggagaggctgggtgcggtggctcacgtctgtaatcccagcacattgagagtgcgaggcgggcagatcacttgaggtcaggaattcaagactagcctcaccaacatggtgaaaccccgtctctactaaaaatacaaaaatttgccaggtgtggttgcgcatgcctgtaatcccagctactcaggaggctgaggcacaagaatcacttgaacacgggaggtggagtttgcagtgagctgagattgtgccagtgcacttcagcttgggcgacagagcaagactccatctcaaacaaaaaaaaaaaaagagagagaaagaaatgaggctggagaggttgggtgagaggtggagtggtaaggagacagcccaaagggcaggtgctacgtggctgtcgatcagggtgtacatgtgaccttggagcaccaggaggtgattgcaggtaacgcttggggcctggagacccctcccatgcagcagacagggtgggatttggcctgcagctcgctctgctggtccccactgtgctgtttctgtaggaaacaggtgagcagattgccatcaagcagtgccggcaggagctcagcccccggaaccgagagcggtggtgcctggagatccagatcatgagaaggtgagggcctcgcgcatagggacccaagggaaagctggagcagcagcccccggtgtgtctagaaaggagagtcttgctgggtgcgtggctcacgcctgtaatcctagcactttggaaggccaaggcgggcagatcacgaggtcaggagactgagaccatcctggctaacatggtgaaaccccgtctctactaaaaatacaaaaaattagccgggcatgggtgggcgcctgtagtcccagctacagagaacaccagggaagggggaagggcatgctgcacactctgctgggattactccaatgacaaggaaaccccgtctctactaaaaatacaaaaaattagccgggcatggtggcgggcgctgtagtctcagccgctcgggtggctgaggcaggagaatggcgtgaacccaggaggcggagcttgcagtgagccgagatcaagccactgcactccagcctgggcaacagagcgagactccgtctaaaaaaaagagaagagagtcttaaatatctgcccctccatcagggcgccagcctggcagtctccacggtgactctgctgcttctaaagacaccagaggaagagcagctaaagtccacactgggccttgtcaagggctgttcatcaatttcattgtattaaataagttaacacagttatcacagtgacttttcttttgtcagcaaaaaaagccttctttcctcctatatttccagttccaaggtggtatgtgaccgttctctgctgtcatgctgtcgctgacatttattcctctagtgtggagacggggctgtccatctgcctggtggctgctgaccccctagctagtgaggcgtgaggtgggctccgaaagagccagtgaggaggacaccaagcaggggctcctctgccagcctcttaaaaagaggaggtgctatttggttatgtcatggttccatttggttacatgagttccttctcagacccttctctgtgtgtccaccttggggtgatgtgtgtgcgtgaaccaacctgccgaaaattaaacagacaaaagaaaaaaaatatgaaaacaaaaagagcaggcaccaccttgtttgcctgcttgcgtgtgtgacacatcctccccatgtggagggcatgagattgaaaggtccttgtaggagcagtttggcagcacgatgaggacttgggatgtggcacgcacaaaaaactgaagttacacgcagttgtgccctcagggtctgagttctggtgctgtgagtggggctgggtgagcgccactgacccaggcattgcggttggccacccgtcctgggctctgtcttcctctgtttcaaagccctgggttatcctgggcctttgttgctgagacctggtgggggtggtggggatgggtctgggcaggagcctgggtctgctctcatcggttttcctcctcctaggctgacccaccccaatgtggtggctgcccgagatgtccctgaggggatgcagaacttggcgcccaatgacctgcccctgctggccatggagtactgccaaggaggagatctccggaaggtgaggctcccacggctgccaggtgcacagcctgtctgggcaggtgggacaccaggaagagggatggggagacctttcacttctgtcatcatcaggaagcttggggagccccagtgactccagcagggctgctttgcctctcagatcctctgttccctgcccacctggggctggtgtgtgtgtgagtcagaggcgcttccgagaacaccagggaaggggtaagggcgtgctgcacactctgctgggattactccaatgacaaggaaaactcatcacaggtctgggcgtggggaaggactgggcaagttccaaaacaaatgcttcctccctgggcatgttagggccacgttaggcctttggtgccagtgccactgctctccttattaggagggattttattctagagatgggacagcaccacacacgggggcagggagcatagcagagagggagcaggattcatgatcagagagccgggccagggctgcagacccgccccaatccatccgatccacctgacccacctggactcatctgtggggctctattctccaccttctcaccacaccacctcctcttccctagaatgttcacttctggtgggtggatggcagcccctcctggtctcaggggcagttgggtgccctcctccccattgttccctatgacagtaccacacagcctgctagtacatgttacctcattcgatttccaaaagctcacacatgggtgcacaggtatggttcccacatgatgggtggatgtcatggcccagagaggttgggcctcacacagctgtagcagcagagcctgggtcccagcccacacagacccagctgcaggccacctctccatctctgaggctgaataaggccatataacattatgaaaactggaagctctgaacaaaataatttttttttttgagacaagagtctcgctgtattgcccaggctggagtgcagtggcgtgatctcggctcactgtaacctccatctcctgggtccacgtgattctcctgcctcaccctcccgagtagctgggattataggcgcccgcccccacgcctggctaatttttgtatttttagtagaggcagggtttcgccacatcagccaggctggtctccaactcctgacttcaaatgatcacccacctcaggctcccaaagtgctgggattacaggtgtgagccactgcgcccagccaacaacaatttttattttaattgaaaaagaggtcggttgctctgcgagtgcacctcttcactccagaagggtcacaatagtgggggcgggagcccaggcgtttattcctgttcagtggccattcccagacacacttcaggtgctgttctcactgttcctccaggcccttgtgcctcttaaaaaaaaatttttttttccactttggaaagctgagacaggagaatagcttgaggccaggagtttgagaccagcctgggcaacataccaaggccctgtctcctcaaaaaataaaaaatgaaaaattagccagatgtggtggtgtgcgcttgtggtccctactactttggaggctggggtgggaggatggcttaagcctgggaggttgaggctacggtgagctatgattgtgccactgcatgccagcctgggtgacagagcaagactcagtctcaagaaaaaagataatcctgtctcagaacaaagagacagataaataaaataaaagaaactttccatggggcttggcgtgctggagtggctctccctggagataggcatgtcctgggagtggcactcacagcaggatatgaacacagcccttggcatcacccacaatgagagatgggggaactcaacagcacttcgattttctccttatttttctaacctttgacagtcacccattactaactgcagctgtgtagagataaagccatgttgtagtcaagtggagacttctcagagggcagtctggaagtaggtgggatgtggccagattacagagggctctgaagtgaggcagaggcttttagacttggtcttttaggtggcaaagagccaacgagccagggaagaagagatcgaaagtttaacatgactggcctggcgtgggttgcaggatgattgagggggaggcaggaagggctcgcatcctaagggacccctgtccttgctgtcacccagcggggttgggggaggacactgttgcccagtgtcttgttatgtgttgtttcctttgttccctctaaaaagttcaaatctataatacacccgtgggcatggagaggcaggcttggccagcacatggggacatgtaagagtcgatgttaaaagtctacatgctgggtacgtaaacagatgagtgtttatgaatatgacgtgaattccaatggtgaggctcagatgggaagctcctctctccgccctcctcggaggccagctcccagcagcacacagagcctcttgacagtcgagggggccaggaaggcaggggattaagggcttgggcttgagtttcagattgacctggcgccgcattccagcactgccctctcacagctgtgtgagctgacaggtatccgaccgtgtaacctcagtttcctcctccaacacggggattccacccgtacttactcagtggtggtggttagtattaaatgaggtcacgcagggaaggctttgctgagctaatctgtgcagagctcttccggcccctggcacgtagtaagtgctcagtaactgttctctactgttaccatcacccacatggctaggagatggcagggcggtggtcggagggtggtatccagtcatgccctcccagcctggcccgtctctaggactctcatgcacagagaattcctatttcctgtgcttagacttcagcctgccttgctcagaactgcagcagctggtgagaatcaaactttactcacctcagaggccccttgctgtgaggatgtgagagccctggggtggtcaggactgcttcctctttctcctcctcctcctcctccggccaatccctgctagttctgcagccctggcttcctcaaaagcaggtcccctaaagaccagggcccagggtcagcactctggtcacatgggctggtaagagacatgtgtggatttccggtggtttgtgaccaccagctctgatgctgcttttcactttcttgacagtacctgaaccagtttgagaactgctgtggtctgcgggaaggtgccatcctcaccttgctgagtgacattggtaaatcccagtcccggaattcaggccgtgtccttcagggagagtgtggtgcccctgtgagtccctgcggagccctgcaggcagacacttcaatcctttggtctctgtggaaggggaatgggagcccagggacgggggaccctggtggagtagggaggtcaacaaggagtcagccagacagatgctgaactcaaataggtttcccttccttcctgattaactcatcaggtgaattatgatgtatagggaataacagatttcctttcccattataaagctcccctccctcctttcctggaatggccggcgctggaataagttgtcattcgaatgagttttgtcccttggcagtgaatttttccgctcccacgtaggcagttctttgccaatgagaggcgtaggaaaaactgtcctttttaatcccttgggtactgttggcttccccaaatgagggcatctgcggcaccctctgagaaggccaagctggccattcatggagaagagtgacctcagcctgcagaggtcagtggagcctcctagaccctggcgctcactcaggaggggtctgagggctgggcgctaaaggtcagcacctggccccagcctggggagacagggagagggacttgctcagagctttttgttttttttaaaaaataatctccagggttgttggtgcaagttgatagttggggtctaaggtttagagttatcagaatttatctttgactctttgcctccagatttggagaatgatgccattttcatccctccactacctcaacctttcaaagctgtatacattttttctttttgtttgctcaagtttttttggaaaattgtcaaatatatagaaaagttaaaagagtagtacagcaaaactcacataccgttcccctcggttcaccagatgttaacattctccctcatttgtaaagctgtcttctctaagccagggcctggaagggttgatggtccaacactgtcttgctagtgtgggtctggtctcttcctgactgctgcttttgacagaggagaagcaagaaggaaaggaaggggaaaagtcaagcaatgacatatttaaggttaagatccaaatagtctgacacagaaaattcccatcttgctctgtgctgtgtcttcgtccctttgggtggagttcacatggaggatacgttgacattacatcagttttatttgactcgaatgagcacccagtgctggcccaagggatcccctgcacatggcccgcatgagtctcttctctgtctacctagagcataatccatcagttagaaattccacttgttttcttgacaccctgacccaaggctcacccatccatgttttgcttggaggcttacttgattgtattttttacctcagtggccagattcttcatttgttctctgttgaattgggttgaaggcaggttagcaggttggggagtattctcttgcttttcttgggtgatttttattttgtttctctttggttaaagctttgtcaagttattattttttttttggatgtttttctctcagatatttttctttcactccttaggctgttgatgactttagcaagtagttattacgaaagtcttttttttttttttttttttgagatgatggcttactctgttgcccaggctggtgttgcagtaggcgacctcagctcactgcaacctctgcctcctgggtccaagcgattctcctccatgagcctcctgagtagctgggattacaggagcacaccaccacacctggctaattgttgtatttttagtagagacagggtttcatcatgttggccaggatggtctcgaactcttgacctcaagtgatctgcccatctcagcttcccaaagtgccgagattacaggcatgagccacagcacctggccaaaagtctttaaattattggcacaagtgccgggcgcagtggctcacgcctgcaatcccagcactttggggggctgatgcgggtggatcacaaggtcaggagttcaagaccagcctgaccgagatgctgaaaccccatctctaccaaaaacacaaaaattagctgggcatggtgacgggcgcctgtaatcccagctactcgggaggctgaggcagaaaactgcttgaacccaggaggcggagaggttgcagtaagccgagattgcaccattgcactcccgcctggtgacagagtgagactccatcttgaaaaaaaaaaaaattattggcacaagtgcacataactctcagcttcctcatatggttgtttattctgcaggtgttttgctgctgatattcacagaacctctctggttacgtattcttttggtctgggtccactttgaattcagttactattgacttgtgtggtagcttttatattattttattcaaattgtgtgcatgtatgtatttaagttacacataaattagaataatgaaaacaggtgcttcttcttaagtgcttgtgtgctataggtctcctatagatagataggtaggtgaatattaaattctgtaggttgctgattctctgtctgtcttctctgtgaccctgagttggaaataatttgactttgaagtactaactagtacactacagttaaacttcttgagggcacaaacttcagtcactgcttatcttcagcatctagaatagcagtatataatcttctctataaatatttgtcaaatgagagctggatgcggtggctcacgcctgtaatcccagcactttgggaggcggaagcggacggatcacctgaggtcaggagtttgagactagcctgactaacatggagaaaccccatctgtactaaaaatactaaattaggccagacgcggtggctcacgcctataatcccagcactttgggaggccgaggtgggcagatcacgaggtccggagttcgaggccagcctggccaacatggtgaaaccccgtctctactaaacgtacaaaaaacccaaaaaactaaaaactaaattagccaggtgtggggcatgcctgtaatcccagctactcggggggctgaggcaggagaatcacttgaacccaggaggcagaggttgcagtgagccaagatcgcaccattgcactccagcctgggcaacaagagtgaaactccatctcaaaaaaaaaaaaaaattgtcaaatgaatcaaataaatcctaaaggaaattaaaataagtaaggacctagtttttttttaaaatcaaatgtccacacatcatgaacagctccaggtccaatactggctcctttgcttattagcagtgtgaccgtgggcacgttacttacacccttttattagcggtaaaatgggagcgttactcaccttgttagaattatggaataaaatgaggtgatataaataaagctcctagcacaatgctctgttcctgcagaatgtgcagtcagcaagtgttagttccttgctcatttccttcccgctctggattttgatttttggcctctccttttggaaaccttcagtgccttctttagggcatgacctgaggctggatccagggaaccacacgggtgggtgccttctgagactcccatcctggaagaggccagccttcctcagacctgttcacatctccgccaccttttgggtgcagtgcagccccggttttgtttttgaggctgctgatgagctcgtattttacttttatccctgtttctgatttgtattctaaatccattaaatttctttttgcaaggatctggtgactgagccggagttcatctaacatagctcttttgtattttggaacatttcctgagcatattttgttccagtttgttccaagtgctggcctcacatttcctttgttggagttgccactgctgttctctgccaggttgacttcagataagtggcagagccacacccttgaccgctgggtccggattcattgccttttcttctggattaaactgttggcccctactctcttctgtgccgctaacctcccagagacacccgctcagaacagtgtcaagataacagacatggataggatttttccactgaatttcaaattgcccaagaagaggctgcagagtgcctgtgagaaatgagcagatggccaggcgcggtggctcatgcctagaatctcagcactgtgggaggctgaggcagatggatcacctgaggtcaaaagtttgagaccagcctggccaacatggtgaaaccccatctctactaaaaatacaaaaattatctgggcgtggtggcgtgtgcctgtagtcccagctactcaggagactgaggcaggagaatcacttgaacccgggaggcagaggttgcagtgagccgagatcgcgccattgcactccagcctggcaacaagagcgagactctgtctcaaaaaaaaaagaaaaaagaatgagcagctgcctggcgggcacagaggtgagccccctgcatcctggccaggactcttctgccagaccatcactccatgctgataggagacctgggacccatgtggagcagctggaaatgatatggactgccacgtaatgtgaccctaaaatagctcaaggaagttatatgtgagtggactctatttaaacagtcttgctcattatcctttggaaaacattggcatgtgttttcttttgtcaagggaggctcaaaattctgggcactcaagattgcagggcaggctgtggtgctctctcctgcctgatggggtgtggctctgctgggcgggcctgggtcttatcagatcttagattggaatcagcctttcctggattctgcaggtggccagtctgctgtggtgacaccatcctgtgctccaggcctttcgggaacccacccctctgttgctgtccctgcttccttctcgagctgctcctagcaggcatccaggacttcagcgttaaagaacagagggtttcagagaaaacatttggctttggggaagagagctccattccaggaactgcacatcaggtgcactgtctagcattgtggatcttctgactggttccattgcatgcatccatctgactgaagtgtggattatagcaaaagatcatttgcacataaagctttttggaaagcataagtaaccaggttaataaatacagtaacaatgagagagaagacagcaggccctcagtcatggctccaccattttatagctctagagccttgggcgaggcatggaatgtcatggccgcagcgtccccttctttaggatgaggggtttggacctccgagtgctctctagggccccgtctccctctaacaactccatttcactgtccagaaatctggttttcaggatggtggccccgggacatctctgacatccgccagctggtggcctaactgcttcccacaggctctgtgtctcatctccactgcctgcccctgcattcgcctgtccgtccttccctccctgcccctgcgctggctgcccgctgctcctcgacgttctgtttccctggccgttcttgtggcctgtttctcaccatattgttcccagaatctggaattcaaccctgaactcatcctaaagtcatatccatgtctgccaggtctttcttccaaagtcaattccagtagaagctctggttgtcttcttcagccaggtccctcctgccatcccctttcttgtgtcatggtgccactttctgcccgctgcccaggaccaagtgtccgtgtcgaacctggtctcacagagtcagcccccgctcctgctcatagccttgcattacggaggctgcagaccgctgcttctgctgattcaatgtcagagcaaatccctgcagcgacctcctccctggcctccttaaccctgtgtgctaacctacccttctgtcttggaagggcacttccatcacagtccactcttagataaaggcccagccccttcgccgtacctttctcccactcagccctgggcatgacccacaggacccacccgccaacctctgtgtgtgacccttggaacccacccgccagcctccaggcgtgaccctcagaacccacccgccaatctctgtgtatgacccacagaacccacctgccagcctctgtgtgtgacccgcagaacccacctgccagcttctgggcatgatcctcggaacccacctgccaacctctgcacgtgacccacagaacctacccgccagcctccgtgcgtgattccaaacccacctgtcccttgctggccttgcacgcgttgccccttgtggaagctgttcttgcacctcccagagaccctgagcctgcccgtcctttgggcacagctgcagacctgcccctctgtggggattgcctggcctggggtcacggggattttcctgtgggtctttctgctgatgtcacctcatttgctcctttgacgcttggcattgccattactgctctgtgatttctgtctgtgccttggcagtgagggctgacttccgggtttggggccagttgaccagactgtgcaggaagttaggaaaaggctttgattcagtggcatgtttcccattgtgtgcagatagtggacactcaatagagcctcgctgagtgaattagtgaagttgtcgcactttcgccttggcacccaacgttactgccttgctgcctcactgattaattgaaggctattttagccaagtaacctttagccagactcagtctctctccccatgtccacagctggccttcaagtctgttttttttgggaagcccagtgacattgaagtggctggcacagtaggacccaggcagtaggttttactgagggaacggacatcctgttgcctttctcactcagtgatgacttggattaccagccagttgacaaccaaccatctttgtacccttctaacctctatctcagccttttggaccatttctctttccacctgttctctatggaatgtagctcaaacaaaaatgttctgaagggaacttagtcatccctctaaacttgtgatagatagagattcatggacccacccttataaaactgctttcttctcggaagtcttgctgctcttatctgttccccagtttgtggtttgtcatctgaaaaaaatacatagggctgtggggctgtgattcggagctgtgattcatcaataagacccacaggattgtcagcgttcttcagttatgtgtttgtgccttcctcatgagccagggaaaggctggggttaccaccggggcacggcttctgaggagggtgagagaaggaggctgttatcttcctatggcaagtctgccatgtggacccattctgtggaaatgtactgtgtcatttatcttagtttttgtgtttttcctgcatacactgcactgtgtcgtttattttagtttttgcatttttctagaggcagggtcttgctctgttgtccgggctagagtgcagtggcacgatcatgtttcaccgcagccttgaattcctgggctcaagtgatcctctcacctcagtctcccacgtagctgggatgaaggcatgcgccaccatgcctggctaattaaaatttttttttttgtagagacagggtcttgctatattgcccaggctggtctcaaactcttggcctcaagggatcctcctccctcggcctccgaaagtgctgggattacaggtgtgagccaccatgcctggcctcactgtgtagttgtgaatagcttaatagtttgcaatgtggtgcttctcacagctcttctctgtaatgggaacatgaaaaattacctggtacagttttatgctttgtggtgtggcttttaatttttataaacatgtcttactgctattgccagggatttagatttttaataaacttccagattcaacagtatttttcttcatctcaatgtctcatttttcatcaaatttaaacaaagttagattctctgggcttgaaacaattttgattcatttcactttagctctgaagtactgttttgtaaaatgtagcacagtgatactgaaccaagctttttgaaagcttattctctgcagggtacatttaagaggacttgcctatcagaatttttacatttcagtcccagaaactatgtgtaacaatacctgttggattctttaaatctggactttattaagttgacagaggtattgaagaatagatgaccaccccgaaatgaggaataaagtttgttttgtacagttgtttaagcataaaaatagacagatattaatagtagtcagagtattcagttaccaacctcttgtccctcctcactgaagatctggtgacaactctaatccacgtggcgtagagagcggtgcctttggtctaatccgaatgctcctcctcttcactggggggttctggggacatctcacctggttgtgccctgggttttgccctgagatgttagcctccagctctgggggccttgtctcagtctgggcatgtgtacttgctcaaattacagtatctcaacttccatatattctgctttggaaaaaactaacctacacttttatgtattacatcctgatactctccagcagtctgtcatataccaaaacaggtcttttgtgaacctatcagttaacagacactttgagttattgcatggccttgctctctgccagccagtagttcatattcaacagcagtgccatccctgtctgcaaggctgtgttagtgcagctattttttatacttcatttaatttattatgctttttcatttgctttgatttttaataaaagtaaaacaaaaataaaagtgctgatgagaagcattggtcttgaaacattaacacaattgagaacaagatgaaatataattttttaggcacatggaaagcagcgagtctttcacctcatctggacattaattggacctaagctgatctactctgtcacttaggaaggaaatgaaaagtaaggaacagtatgatatgttggaaccacatggtcgaaggctggacttaaaagagcagatgcaaggagagatctggcaccacagatagagcatccctaatcccaaagtccaaaatctaaagggctgtaaaatctgaaggtttttgtacactgacatgatgccagaagtggaaaattccacacttaagtacttaacacattgttccatgcacaaaattattaagactattgtataaaattaccatcagactataaaatcatttataaaaattcagttgtttcatataaggtatatatgaaacaaatgaattttgtgtttaagcttgggttcattaggaatatgccagtattccaaaatccaaaaaaaaaaaaactgatcccaagcattttggataagagatactcatcatgtatagcttaatgttctgagctggaactcctttaataaggtggaagtcagttgttcagctctcagtttgactcttaaatatgttttcagcaaatgttcagcttagagtctttgcagagaatgtttgcttactcagtttctgtggaaggcttttccgttaccctgcacagagggccgtacccatgacagcagataggatcgctgcctgggcctcaggggtcttcccctccccggcttgccgagagggagagagagagagagagagagagagagagaatgagagagagagagagagagagagagaatgagagagagagagagaggagagagaatgagagagagaatgagagagaaacagagagaatgagaatggtggtggcggcgacggcatacagagggttcattgttaaacctctgaatgttactgcttttgactttttaagttttaaacaagaaacaggtcataccattaactatccctctgagtcagaaaatatagacccaagagttgcctgttctaatgtggcactaccataatttgttctaacatttcctaatgactgtctgtttctaattatttcattcaagatatgcagtaagtatccttgggctaccagtgaagtgataccatttgtatctcttcttctgtgctttctcaccacttgacattctttgcccatttttctttttctttttctttttttttttaggtagagtcttactctgtcacccaggttggagtgcagtggccatgatctcggctcactgcaacctctgcctcctgggttcaagcaattctcctgcctcagcctcccgagtagctgggattacaggggcatgccaccacacccagctaatttttttgtatttttagtagatacagggtctcaccatgttggccaagctggtcttgaactcctgacctcaggtgattcgcccacgttggcctcccaaagtgttgggattacaggcgtgagccaccgcgcccagccccatttttcttctgcattgctttcttattgatttataagagctttttatctattaggtatctttactctttggtgtatgtgttgtagatattgtttccccacctctcttatcttttggctttgtttatagtatcttttgccataaactttgaaaaccttttaatgttatttgcactgttctatttataccatgtgactttcctgcatacactgctctttttgctacatgtatcccatggtgttttggagtttttgttgctaatgtgaatgggattttttttcctttccactgcaactggatatagctaacatagagaaaagctattgacttgtgtattcttgttcgtttccagacaactggctaaattttatccagtgtttagtctgttgagctctctaggctacatctccaaatctatctccatctctagtcatagcatctccaaataaaaataattttatctcatttcagtactatttatttcatttctttcttttatagtgcagtgaactagatgtctgtcaaagttattcaccctctcttgagggtaaaatcatgtccttcttgccatctgagctgcaggcgggtgcctcctcatgtgacatcatcacgttgcctcctcacagcagaagctcttggtatcaaatgcttccgtagccagtgttgtgcagtctgctttcttccaactagattctgagctctttaaagttggggatcatgccccttattttatgtccctcacagaacctcccagagaactgggcatgtagtaagtctgtgtagggctgtctgtatgtgtgggaggtgtccctgttctcctcttctgcctccccgctgcttcctggaagccagttctgacctcttgggactgtcgatcatatgaccataggactctgtccccaagggcccttcctccttgcccaccctatagaatttagatttttgagcctctagaccaaagaaacttcccttctcaaaactttattggcgtcagcatcacctggagagtttgttaacacagatcgtggggtcatccccagagacttgaatccagaggtctcaggtggagcccgagaatttcacattttgaacaagcttgtttgctgctggtccaggtagtatagtttgagaagcactgctctaggctgcagttggtgacctcatggatgcaaggcaaagagtgctttgcgcaagtaagccagattcctgtggaagtttaagcctcacgtagcagggcccctgccctccaccctgaggtattgcgctacaagtcagagtatgtttcaggggcatgcggcatttatcttttgcaggataggagattctgtcatgaaaagcattttttaggcctaagaaaaactcacccccctcttcctcagcctctgcgcttagataccttcatgaaaacagaatcatccatcgggatctaaagccagaaaacatcgtcctgcagcaaggagaacagagggtaagtgacctcctgggactgggaaagcctcaggtgggcgtgccgggaagtggcctgggaggaaaggagcacactctgcatatttgtgtgtatttgcatttccttgcctgtgctttgattctctgggaatgctgtttgatttgaaacaaaattgagcaaaaaagttgttgcagattgaggcaagtttaaatggattacattgttagttgctcaagttgcaggaatctgataaggaaaataatgtttgccttcctacctccacccctagcctctgggactagcgcttcttggaagtcgactttttgttttccatttgctttaagagcctcgcctctcgactctaaatggaaaccagtggtcagttggttgtggatgtggctgggaagaggcactgggagctggcctctgctgccaagcctggtccagcctatagtttccccagagctctttgtggcctcctcagtggccacccggctcagacgtggtgttgactgccccacaagcttgacattgtggtctttacccacccactctatgtgttcagctggggtggtgagcacaggctcagctgagtggaatacagtgaatgagttcttagatcacctaatcccttcccatacagctgcccttagcacctaggcctggcctgtgactaccacagggctcgcccttgttccagttcaccctcactcctgtcagtggtgctcagatttgagaactgagggcatttactgagaagaggctggcccggtccttcctgtttcaagtctgggtttagctgtcttgagggctggtgcctgttctgttcattcagcttccctctgatgatgcgtggcagagtgtgggaggacacgtgcctagcatttttacaatatgccttttcttttagccctgaatctaccgtgtcgagggcattcttttgtgtatctggtggctcttaggagtttgggatctaatagtacctgggaattcagaaatacctctgctctaacaccaggcagtcagaatcctcgtagaaggacattgtgttcttataaccctcagctttctccttccttttgttttagttaatacacaaaattattgacctaggatatgccaaggagctggatcagggcagtctttgcacatcattcgtggggaccctgcagtacctggtaagaagtgggccttgcctgtttgcctgtcagctcctccctgctgctgcatttgtggggctcctgtcctgccttgctcccagcacctgagtcccaccggctctctgaatgttttggagatgcatgaggtcacacccataacctggtcgagtcagcattttttgccaccagatgccctgtggagggatgtggtcgtcttctctgatgtccggagggctctgctcatgcgccttgcaccatcccctagcctctctgtgcttcagtgtcttctctgaaaggaaagggttttaaacagatccatgctggtcttgagcggtcctcccacctcagcctcctgagcagctaggactacaggcaggagccactgagcctggccgaggccacactttccatgaggtatttcaggggccactgagtaggggtcagagctctgagctccccaccctttgtttacgttatttggtctgaatattaggtttctgtttgagtcactcattcattcaagcatattgatggagtgtagtctgtgtcaggcactgtgctcagggctggtgatgcagtggggaaaaaagacaagcccttttcggccttcagagcttagggtttagcaggaaagcaagcattactgtgatgcttacacagataactaagaaattacagttgtggtgagtgttacaaagcaagagtgcagggtgttgcaagaatatatattgggtggcctcagcctggtctgggacttgaagggtaaggaggtgaaaagggctggaggtgggggacggcagggggaattccgtgcaaagggatcacacacaggaagacctgcaggtgtggctggaaccgagcacaaaagggaaagagagtcttgagttgaagctgagaacaaggtagagcacagattatgaagggccttcagggctgggctaaagttctagactttatcttaaaacctctgcagagattgatgggttttaagtgggagaaggagcaactctttggaaagcccactcctgacactgtgtggagaaggaatcacactgaacaggagggaagagtgggtgaggtaggggcagtgaagatgtagagggcaattagattccaggagggcttagcacaaatgcccagcaagacttgtcataggttgcttgatgatggcagtagccaccacaattgggagtgactcaaggagtctgcggctttcagagtgggtctcacagagggctgtgattcaggcgcctgtgtccatatggcatgtgatttggtagatccttctggagtcctcctcagctcagcagcagtcgagcaagggggaccccatgctctaaccaggagctgagtcaagtcatgtactcacatgagctaaaacgtctgcccataaccagacatagaggttgacctacccatcccggaatgtcttctcttggtttggtctcccgggcccttccttaagcttcacatttccaaccagaccatgcaccaccctgtctctgtgcttttgcttgccccagtcatttctgtctccacccacctgctaagcccagtctgcacccccagcaccccgtgctgccgccccttcttcggtcaccccagcgctctctgcctcagcagcagccatgcatcacactttccctgcctgtttctaaatatcctggccctttctgcaaccacatggtacctggttcaggggttcaaccagcacttaatgcgtgtatttggtgtggacagcctggcatcattttcctttaacatttgtagcctctcttcccatttctacacagtgcccacgactgtgtcctgccttaagctagttttcaataagcgcctgaaatgctgcaaccctttttttttttttccttttttttctttctttctttcttttttttttttagacagagtctcactctgttgcccaggctggagtgcagtggcatgatcttggctcactgcaacctccacttcccaggttcaagcgattcttgtgcctcagcctcctgaatagctgggactaaaggtgcacaccaccatgcccagctaatttttgtatttttagtagagacggggtttcaccatgttggccaggctggtctcaaactcctgacctcaagtaatgcgcctacctcggcctcccaaagtgctgggattacacgtgtgagccactgcgtccagcctgcaaccctcagttttaaaggagagaagttaaagcctagcgatgggtgtgtgatgtactctggccctgaatctttagcccctccatcagtacctactggagtgagtgggacatagaaaggtcttagaaatggtagcatgatatacccgctaaacatgcctggggtgccctcctcgccctgcatgcatgtgccagtgccctctaggatgaagccaggggtgaaagcagatgggctggccgccccctcctgccgtggtccccccagagaggagcagctcaggtgtaccccctcctgttgctgcaggccccagagctactggagcagcagaagtacacagtgaccgtcgactactggagcttcggcaccctggcctttgagtgcatcacgggcttccggcccttcctccccaactggcagcccgtgcagtggtgagtgggcccggggcacctggatggaggagggagcctgtctgttcctttctcttcacgtaccctgtttccctggcgccccatcaccgggcctgggagatctgtgttgtttctcttccgagaggaaggcctgtcaggacctagcacgagtaggggagtggtctgtgctccaaggacctgttaatagatagagtagctgttaagtcttcatgtggattctgagccttcacatctttaaatacaatgctgtgtcagtgtcatctgctctgtgttcagaagtaagactattgtatgaatatacgcacttacactgagaatgctgtgtgttagtaaacaaataaaacacgtgtacacatgacaagtcaggaggaaatatgtgaaaatttgttgttgacaaatgttactacaacctgaatataaatttttgtttttaaagcgtaagaatgtggccgggtacagtggctcactcctgtaatcccagcactttgggaggccgaggcaggtggatcagttgaggccagcagttccagaccagcctggccaacatggcaaaaccctgtctctactaaaaaccctagccaggtgtggtggcgggcgcctgtaatcccagctactcggaaggctgaggtgggagaattgcttaaacccaggaggcagaggtcgcatcactgcaatccagcctgggcgacagagtgagactctgtctcaaaacaaaaaaagtttaaaaaaaaaaaaaacaacagctgagcataaagcataagaatgtagctgaaattgtgaacctaataaattacacaaaaatttttccagtaaaaattaaaggatatgatgaagatttgtagaattaccctgtattctttagcttttgttttactgattaaagaaataatgcattgtgcaggatatgtttatataaaagttaattatcaccaccaaaaatggtatgtgaggtaatgtatatggtaattagctcaatgtagccatcccacaatgtgtacatcatgttgtacaggataaatatagaccatttttatttgtcagtttaaatcaagaactgggggcagaaaagaaataaaagttaattattactgaaagccataatttaaaaatgaatattcccccaaatcagttagatttcatttaggattgttccttgagaggccacacactagtttaaatgatgctactctgctcaaaatttacttacttcaagttttattttttttggaaccgtaataagttcatgtggctcaaatttccagaagaataagggagtatgcagtgaagtcataccagcctcccaggccctcatttacctccccacaggcacctgctgtcttccaagaatgttttcatatcttccaaggtgttcgtatcttccaggggtgtttgctacgtgttccagtaaattggcatatatttgtttatttgtacattgatgtttcccctcttttttatcccaatggtagcattatctgaacacggtcctgcacatgctttcaagcttttcacaccatgagaatttctttttgagccaatttatctgcaacacaaaaaattattattttgaacttaaatagtactgcatagtttaattaccccctcatttttgccagattaactttgtttcatttttgtgttttggaaaatatggaaacagtaaaaaagcaggaatcaactgtcatcccataattggaaaacaatcactatgaacagttgtgtgtctccaggctcttcagcgttatatttttgtactttttaaacaaaaataggttactataatcttcatacaacgtgcctttcaaactagatatcaaaaatgctgtatgtttttccttattatttgtaatgtctgttatttcactgaatggctgtgctgtggttcatttaacttatcccccgtggttggaaggacgttgataatttttacttcttaaaataacaccaagaataacatccttgtagggaaattcttgcacacagttgtttccctaggataatacctagaaagggaaataacagattaaagagtttgcacgttgtaaaggtttttgatgcatattagttagcaaactgctcaccaggaaggtcatataaatacacgtctccacctggagtgtggacactgcccctttcaccacatccttgccaacactggctattgtcaccttctggaagtaatgaaaacaaaacatgaatgttttcagaggacaagtgtctacatcttgagagtatttgtttataagaataaagtgggccaggcgtggtggctcatgcctgtaatcccagcagtttgggaggccaagatgggcggatcacctgaggtcgagtttgaggccagcctggccaacatgatgaaaccccatctctgctaaaaatacaaaaattagctgggcatggtggcacacgcctgtaatcccagctacttgggaggctgaaacaggagaatcgctggaacccaggaggcagaggttgtggtgagccaagattgcgctgttgcacttcagtctgggcaacagagcaagactccatcttaccaaaaaaaaaaaaaaagaaaaaagaaaagaaaaaaagaataaagtgtatcctttgaaatcaattccagaaaagtggtcttaggtgatggcagtctgttcaattccacgtttacctcccagtgagggaggtgtctgccctgagttttgagaagtggcaaagtatgccccactatggtgacttattttaaaacaggcattgctcctttagctacataggttctggaatattgaggaatttgttcattaatttatagtcacactttatagtatacgcattataaaaatagctttaaattgcatgtacatctatagtgggtttttttgtttttgtttttgttttttgagacagaatctcgcttttttgcccaggctggagtgtagtggcgcgatcgcggctcactgcaagctccgcctcccgggttcatgccattctcctgcctcagcctcccgagtagctgggactacaggcgcccgccaccacgcctggctaattttttgtatttttagtagagatggggtttcaccgtgttagccaggatggtctcgatctcctgacctcgtgaactgcccgcctcggcctcccaaagtgctgggattacaggcgtgagccaccgcgcccggctgtagtggttttaactaaaggaattattgcatttcttcaggtcacttgttgagcatgtctcttatttatgacaagatgagttaaaatccattagaactagaagaacaggtgctttttgaaaatacattcctaatggcccagcgtcttcataggaaatctgttgtctgcagagccatcttcctagagcttccctcatcagtgctggaggaccaggtggccagtttcaagtagatttctctgaaacccaataaggagctgttttgtggactatctagtttttaatgctttgggaaacttttaaaaaatttcactatcttatctcagatggcaggtaaatagtaatttccagacaaatgcaatttgggctttacaattctattataaagccactttgaaatatattttaggacaagcccaagcaataagcatcttattttgggtccttttctaatttcccatcaacagcctaagttttctagcagaggcttattccacacttacataattagaaagtcttggagcccccgacttagagctgtcagagtttcagcccaagctataaagcaccagcctctgccacgcaccggctcttctagctttccagtgccagtgtgctcccgataggccggttcaccacttgccaatgagaattgtttggagcaaagcattttttatttgaatttcctagatgttttgaggaaaaaccgtagttggacattcagacagaatagaaagaacaccagacattgggtttgagcccctgattctgctactctgttgtgtgaccttggacaaatcatttgatcatcatttcctttagtccaaattgggggactaaaaataatgtctgccacatgggcctgtcacggcaataagtgaataaatgatctgtgtcagagtacttggttatctatgaagtattattcaaatttactcttcttattaccaagatttgaagccatttgtatgtagattatttttactggccgggcactgtggcttacccctataatcctagcactctgtgaggccaaagtgagcgaattgcttgagtccaggagtttcagactagcctaggcaacatggtaaaaccccgtctctacaaaaaatacaaaaatttgctgggtgtggtggcgcacaccagtagtcccagctactcaggaggctgaggagggaggattgcttgagcctacaaggtcgaggctgcagtaagttatgattgtgccactgcattccagcctgggcgacagaaaaaaaaaatttttttaccttcagatactacttcacataccccaagaagttccctaagttgggaaatgtataagttcatttatccttagtatttagctgtgtacatttagagggaagtatctatgtgtgtgcgtaggttttgcatattttatgtaaatgtcgtatgcatgctgtaatctaggtttggaagtcctaattttaacctctgtcaaaacacaagagtgtgtaatagatgaaatagaaggtagagcaagggagaaggaaaagccaaggatgagataaggaggcagtggtactatctgcagaactctgggcacaagatggtcagtgactctgctaaaggttgctcttcaaaaactcatccaggcagtcctgaccagtcttaaactctcaaagaatctgcctgactcgatgtgaatgaactgactgctattccaaaagactggggctataagtctcctgtatagttgtaaacttatattacaaatgtaaaatggctcttgagtgctaagtgtcgtagggatatgtatgactgtatatttcattgacatcccagtcaacaattgactgcatagatgacagtggtctcatgagattataatactgtatttttactgtaccttttctgggtttagatatgtttagatacaccaatacttaccattgtgttaccctggcctacagtattcagtaccggagcatgctgtacaggtttgtagcctaggagcaatagggtgtacgatacagcctaggtctgtagtaggctaaaccatctaggtttgtgttatgttcacacaaggactaaaatcacctaatgacgaatttcttagaatgtgtccccgtcatagcaacgtgtgactgcacctaacaagattcatatttgcaggcattcaaaagtgcggcagaagagtgaggtggacattgttgttagcgaagacttgaatggaacggtgaagttttcaagctctttaccctaccccaataatcttaacaggtaaggcacagcggcattacacgaatacatatctttcttgctttttttagaaatacaagtcttggctggccgtggtggctcacacctgtaatcctaacagtttgggaggctgaggcaggtggatcacctgaggtcaggagttcaagaccagcctggccaacatggtgaaaccccgtctctactaaaaatgcaaaaattagccaggagtggtagcacgcacctgtaatcccagctactcaggaggctaaggcaggagaatcacttgaacccgggaggcaaaggttgcagtgagctgagatcgtgccactgtactgcagcctgggagacagagtgagactccatctcaaaaaaaaaaaaaaagaaaaaagaaattcaagtctgaagtgacatctgataacttttaaacaggctatcaggatatcgtcctgtgactaagaaattaacatagtccttcttaatcttaaatctggaatgggttttcctcccttatctccctagaaatcatctcttttctaagttcacataacaatttatctatacctcttattacccttaatagcctctaccttgtatcacattcggttttgcatagggtttatctctgattcaacagcagtccttttaagggtagggaattataccttatttctctttccacccctcatgtggcccaattctgtgtcacagtcaacaaataaatctttgtcatttgaatggcattacaatccagtctcagagccagaatctaaacaattaataatattgtataattgtacagaattgggtaacagtgcaaaagaaagctacaaggcagtcacacataattgagtgacatggataatgattaccatatttagagggtggaagagatgattggatggattagtgctatatggaatgacgtgggataagctagaactttttggaagggtctagacagatgtacaggacatggatagatgaagagaaaggaggaaggaaattctaaggggaaagattgaggtgagcaaggcacgtttgggaggtggtgagtagctgtgttggcctcagggaagggtttgagtgctcacaggaggcaggctctgcagggccaggggaaggagtttggagtttgtcatgtgaaccgctatatctggcagcatgggatctagattctgtaggggtcacctaagctaggatgtgcctataaagtgtatttttaaaacctcatgggttattctttttccccttctttcttcctttctttttaagacagagtctccctcttgtcacccaggctagagtgcagtgtggcacagtcttggctcactgcaatctctgcctcccaagttcaagggattctcccgtctcagcctcccgagtagctgggattacaggtgtgcatcaccacgcctggctaatttttgtgtttttagtagagatggggtttcaccatgttggccaggctggtctcaaactcctgacctcaagtgatccacctgctttggcctccccaaagtgtgggattacaggcatgagccactgtgcccggctctcatgggtcattcttatgcagccatttggaggtcagcaatctctgatttgggggtattttagaattcaggagagaggtgtgaacacctgaataattgattggaaatgtttatactgtttctgataaacccattttcattttcaatcaccgtctactggctgccgtctgtgtgtatactgggagacgcacactgtagcccaacattggctggaagtgtctcctcacacactatgctcctctccacagtgtcctggctgagcgactggagaagtggctgcaactgatgctgatgtggcacccccgacagaggggcacggatcccacgtatgggcccaatggctgcttcaaggccctggatgacatcttaaacttaaaggtgagtgtggagccaagttagccctgaggcaaaagctggggtccccagtggaacatgcagttcttaggacagagcaggggatggggccagctgacctagtgaggaaatttaggctcctgcatcagtctttctgcataagtaaagaaaggacagttgtgctaattgacattggctatgaggtcatagccacagacaggattatgaaagatgcaaatatgcgaaacatggcacatgacctccctccctcaagctaggcccttgctttgtgtggttgggaaatgttgggagtagcagagagaggacctaggcaaatagatgggcatttccttgaagaaatcggttttccagtaacatctgggttgtgttgcagctggttcatatcttgaacatggtcacgggcaccatccacacctaccctgtgacagaggatgagagtctgcagagcttgaaggccagaatccaacaggacacgggcatcccagaggaggaccaggagctgctgcaggaagcgggcctggcgttgatccccgataagcctgccactcagtgtatttcagacggcaaggtgagccctggcttcgtacacaccatcctgtttaccttggctgtgcctcctgggaaactcaacacactttcagatttcaattctgctttgtcatgtagtctgttaatcacacagtgcggatacctggctggtttttaagttggagtatggtgtcctctgtgtggcctgataggaaacacaaatctccttgctggacttgttacttccaaaccctccaagaccggtctcttgcctttattgcaaaaaatgatgctataacactcgaatctctcaagttgcctgcttggccctcttccaagtgtactaaaaaaaaaaaaaaaaaggatgctgcactttcttgagtcaactgaaagtatttatgatggcctctgtgtacagaactgggttaggcacctgtgttaactatagctgtgtaagacatgacctctgctcaaaaagaccttctcagctgacttgtggagctaaagttatcatatgagaaataatcattgcatagggaagtatatagtgaatttctgaacttcccagggaagacagagagtaaaatagaatgtaatacgtttgtaaataaagagtgtgttcagacagtaagtgtggctggaaacgttaaacacttcatggatgcttcctacttgctggctgaagatgatgctcttgctgaacagtggggaaagctgtggaacttcttcattatcagttagaaaagagagggttggatccacaagattcattttgtccttgtccctttgcagttaaatgagggccacacattggacatggatcttgtttttctctttgacaacagtaaaatcacctatgagactcagatctccccacggccccaacctgaaagtgtcagctgtatccgtaagaatttgttatgttttgtttttctaaataatccgttataatatgtgggacaaggcagggaagggagactggactaaggaagggggagccacgtaaaggaaattaatatcgccagtcctcagggcagccttccttatttaggacatgcaaggagtagccaggcaagagagagtacaggaaaccattagttaatttcaacctcctaggacgggcgtggtggctcacacctgtaatcccagcactttgggaggctgaggcaggaggatcacttgagcccaggagttcaagaccagcctgggtaatatagtaagctcgcaagtctactaaaaatttagaaattagccagatgtggtggtgcatgcctgtagtccagctattcaggaggctgaggcagaaggatcacttgagcctgagagttcaaggctgcagtgagtcatgatcacccccactgcatgccagcctgggtgacaagagcgagaccttgtctcaaaaaaaaaaaaaaaattctgttgaaaatatatggccctatatacatatgtgtccaatggttcgtaaagtgttccttcaaatcaacagctacttattgaccactggtacatgctgttggtacaaatacatgtatgtgacagtaaccaggcataacaccctccaaagttacatgatcctatagtaggtacaaaacgtgaaagtgccagtagtgtcgaaggcaggatatggttaattgtaggagagttattgtggttattctttgacaattgcttgtgtctctgtctccagttcaagagcccaagaggaatctcgccttcttccagctgaggaaggtgtggggccaggtctggcacagcatccagaccctgaaggaagattgcaaccggctgcagcagggacagcgagccgccatgtagcgtgccaggctttttttttaaacttaatttatttaaaattccttggtggctttggccacagggaggtggttgaggcagggacccagaagcaaccgttatgagcaacaaaaggaagacactggtttggatggacgggaagcggttgggtgggctggactgacggaggcccctttagacctggcgaggtgagtgtggttggcacagggtgaggagtgtggaactgaagctgggctggccaagctgtggctggtttgggaacccagaggagctcactaccatgtggattagcaaaactcccctgaccgtgctgctggggacttacggactctttcctcattgtgactcgtttgccaacattattggccttttgtgtcttcctttgcctgatgtcaagtttagtgcagaacctcaggcattgctgagggctaggaaattgtccttgggttataagtggctgctataataatagtgatgatgataataattatagcagggacctcccttgacatttgagggggttttgttattgtacaggaaatggaatttggatcccagagatgctccaagactgttccttgtggtccctgcaggatgaatctcctccgaaacaacagctgcctctccaaaatgaagaattccatggcttccatgtctcagcagctcaaggccaagttggatttcttcaaaaccagcatccagattgacctggagaagtacagcgagcaaaccgagtttgggatcagtgagtgtgcactttgcaatgagtttaaagacaccatttttttttctttttctctttctaaggtttcttttgtcctattataattgagttgcttatttctgtttcagttttgtggtgtttttattttgttttgttttgtttttccttctcaattttttttcagcatcagataaactgctgctggcctggagggaaatggagcaggctgtggagctctgtgggcgggtaggagactcattttgggtttcggaacttaccaagggggtgagattttgtgctcccacttttcactttctcatcaaacactgggtcgatctctgtcaaaaatcaggtgttcctcaccatgctttgagcttaactggaccagctgaaaagaggccaagagagtagccagtgaagggagcccctctgtggccagatgcaagagctgcatgaatggacagagatggtccaggtttaaataagaagcaagggttaggttcccttggggaaaagccaagaccatttcctgttaggaagggcattggatggatgatcaacactccctcttgtcgaaggtttttgactaattttgttgggatgctaaatccataggaaataaaaggtctaggcagaaagtctcagggcagcgtaaatcagatgtcaccaaaaaaagttaattatgaaggcaaaggaaatacatgtgacttaatgaacctcacacaaactgaaggttgaagtcaggctccggggctttttcctggacttatcctctgttttcccctgtgtacttgggcaaggatcttcacctgtgtcttagtatcgatttttatgaatcagtactgatggagtatatgtgtgtttaatggtgaatattaaccatagaagggctgagtgctcctccccatcttgggactcataatctgtgaaataaaacagtctgggcctccctgcccgggtagcatcaggatagacagatgaagagaagagaaagtaatgtgtcttgggcatcttctgtatgccaggcaccatgccagaggctttaagtacttcatcttacttgactcctcagatggccctgttagaagcctattttatgcaaaaggaaactgtagctgggggtaagtaacttgccaaggggtcacacagctagaaagcggtggaccctagatgcaggcgcagccattcagaccccacagtccacattcctttgagccagtccattgagggtcctcagggaatgtggcgggtcccctggtctcgctcccccgcagatcttgcatctcagcatgcgcctaccacatcagttgacattagcacagcttttccattaggagaacgaagtgaaactcctggtagaacggatgatggctctgcagaccgacattgtggacttacagaggagccccatgggccggaagcaggggggaacgctggacgacctgtgagtactggctggggggcccctctgtgcccagcacacacagacagccctggagcttcggtgtgtgtgtcaagggcaccctcagtggctgtgcgggaccattctctagagcatgcttccctgtggggtcacttccagcaaatcatcactgagcttcagtttccaaatctgttcagtgacaagaaaaacagtcttaagtcacgaagttgtaaggatgaattcagataatgcatttgagacgcaggccataatctgtaaaggctgtaaaatgcaagcagcctctacccctgtagcagactcccctgatttgttccacccaccctgactcaggcatagctcagagcagaaagtaaaacagagaaggaagaacctgatgaggcttaggagtttggacctggaaactattcgtttgagtctttgtcaggtatttggcattggctccatgaggggcggaggggtctaggcagatcactcctacctgaaggagatcacatgtgctcctggcgtacagatggagggaaccaggcaggccgcttgagggctgtgtcaccgtgagctcagcagtgttccctgattctctcactaggattcttaggacaggagctccaaatgtcagaactttgattctgtattttctctaattaaccctttattctcctctagttcttttatttgtatttgtattatttttttaagagacagggtcttgccctgttgccaatgctggagtgcagtggcacaatcatagctcactgcagcctcgacctcccaggcttatgcagtcctcccatctcagcctcccaagtaaccgggactacaggcgcatgccaccatgctcagctaatttaaaaaaaaaatgtttttggctgggcacagtggatcacatctgtaatcccagcaccttgggatgccaaggcaagaagattgcttgtgagcccagaagttcgagaccagcctgggcaacatggtgaaactctacctctaccaaaaaaatgtaaaaattagccatatttgacctcaagtctagacagaacttctttgtatattttagagaggagcaagcaagggagctgtacaggagactaagggaaaaacctcgaggtaagtggggttctgtgtctgccttgggcttctccttatctcatttatggggcatcactactctctgctggcttccttgaggaactatgctaccctccctctctccagaccagcgaactgagggtgacagtcaggaaatggtacggctgctgcttcaggcaattcagagcttcgagaagaaagtgcgagtgatctatacgcagctcaggtatgagccccgaccttcctgctctggaggaaggactgggagatgcaggtatgaggtcaccttcctccctcctctctgattcgctggacctcatgaagagagtttctgcagctgctgactggatgcacagctgccacaggttctgctttctccagcccaaatgccattagtttgccatgtttattctttgcagtaaaactgtggtttgcaagcagaaggcgctggaactgttgcccaaggtggaagaggtggtgagcttaatgaatgaggatgagaagactgttgtccggctgcaggagaagcggcagaaggagctctggaatctcctgaagattgcttgtgtgagtgagtgctgtggtcccgggcccttggcctagcagcctcctgtgcctttccacctctgtgcactgccgccatcccacacgggacaccacagagccaccagcagcccactcagctgctgctcgggcttcacgtcgctgttctttgacttggtgtaagcggggaggtcagaggaagggcctgtgctaattgttttcattcatctgtgtattactttcgtgtggctactgtaaagattagcacaaactgaggggctaaaacaacagaaatttgggctaggcatggtgactcatgcctgtaacgccagcaatttggggaggctgaggtgggaggattgcttgagcccaggagttcaagactgcagtgagctgtgatcatgccactgcactccaacctgggcagcagagctgtctctactaaaaacaaaaacaaacgtgttatctgagctctagagcccaggagttgaaagtcccgtgtcagcagggctgagctccctctgagggctcttggggagggactgtccttgcttcttccagctcctggtggttccaggcgttctttggtgtgtgactccagtctctgtctctgtcttcatgggacccctgtgtcccttatctgggtgactcttacaagaacacttgtcattggatttgagtcccacccaagtagtccagggtgatgtcatctcaggttctctaaagacgctttctccaagtacggtcacactcacaggctccaggagttgggatgtgggcatatccttcttagggccaccaattcagcccaccgtcatgcacggcagtgcaacttggttgaccatcgtctgcgtctgcactgccctcagtgcagtaagccacgctttctgtgcacaccgtcttaacgtagctgtgagtccatgggatgccacatggtggggaaatgggaaacaaaacagccaagaactgagacgggcaggcctggccgtgttgtgggagccagagctgttgggactgcaagccccattgtgaaaggctgcagagaaggtgacatggatgaaagagtgatttaggtgtcagtttcccttaagagcaaagggaaggagagagggagatggttgctcatggtggaagcaggagatggtgcattaggagattctcattgtcaaaggcagaggggacaatccacacacagtgcagagaacagaggggctggggtcgcatgccagagcactgagcatgccttgggagcgtgattgacacatcctcctgtaagaagagaggaacgggagaaaacaggatgacgaggtagagaggatctgaagaggagagggaggtgcaggtatgcgcaggtgatagcctgatgtgccatctacatccattgagcatttactgaatgctaactatatgcccagcaagacacacaggtgagaaggcatggcacctgttcccaggagggcctgatccttcaaggggcacagacagaggcatgagtgagagccgttcagggcaggaagggctaggaagcagctccaggaggcatgagctgcagtttctgtgcacagggggagctccagcttgtcttagaggagagggagcaacaagaaggttcacaaggagctgttccagctgaagagtgaggatgttccaggacagagacactgctttatcaaaggcagagagcctggggagtcagtgtgttctgagtggggacaggctggtgtgtgtggggaaggccacaatggaggatgaagctgctgaggtaggcaagggtgagcttacgtgggccacgcttcattttctttttttttcgagacaaagtctcgctctgtcccttaggctgaagtgcagctgctcaatctcagttcactgcaacctccacctcccgggttcaagtgattctcctgcctcagcctcccaagtagctgggactataggctcatgcccccacacctggctaatttttgtatttttagtggagatggggtttcaccatgttggccaggctggtctcgaactggcctcaagagatctaccccccttggcctcccaaagtgctgggattacaggcatgagccaccgcgcctggcctatgtccattttcaaagcacacaggacacatggcagtatctgtcttttcccttgatattaaaggaacttgagtgtagggatatgatcacatctgggatttggggaagtccctctccaggcagctggaggatctgagtccctggccaacctcagcactgagaagggccgctcagcaaggctggagttgagccgccgctgtgcagcacagaacagggtggggcaggagctggggcagggcctggctgggagggagccaggcagtgcaggagccatcccctgccatactttcggtccagggcagaagcacaggaggccaatgccgggcctctccccaggcatggtcagcagggaaggtgcagcaggaggaccaggaacgggaggcttgggtgcttaacatggcttcttgatgtgtgggccttgaggtttcgctggaggggaggatgtggagccaggatggttccacggcctgagggacacgtgaggggatgaaggactgcaggccgaagtgagtgtcaggtgtggggcctggggggctacatgggtgggttggggaccatgcagggcagagatcagcagaggggtgacctgaagattggccggcggtcgtgggctgtgagctgaggaggctcaggtagctggaatgggaacccctgcttgacccttcgggctgggaggggcagtggctgcagccccttgggagtcagggtgtccttgtttcttctcagccaggtcatagaggatgcaagccacaggaattcccatagcctttgtgtgtgtgtctgtcttctacctggaaaacagtaagaatactttcctgttcttttcttgtaaaagttcattaaggggctggatgcagtggatcatgaatcccagaactttgggaggctgaggcagatcacctgaggtcaggagttcgagaccagcctggccaatatggtgaaacaccgtctctactaaaaatacaaaaattagctgggtgtagtggcacacacctgtaatcccagctacttgggaagctgaggcaggagaatcgcttaaaccccggaggtggaggttgcagtgagccaagatcgcacatcgcacttcagcccaggcgacagagcaagactctcaatcataatcaatcagtaaagctgatgaaaataaaaaagcctgcaaattaatgtaggcacccaggtctccttaaatttagaatcctttcctcaaaagtctccgttgatacagaaacacttttgaagccagatgtgaagcaccagttgacccgcaggtgggggtgccaactggtaggctgtagggttagctctggcctctggcagccagccagttgtctcctaagaaaatactgtggcgtgaatgcaaaatgtgattcatcacttggctcctaatttcttttgattttgtcccctagagcaaggtccgtggtcctgtcagtggaagcccggatagcatgaatgcctctcgacttagccagcctgggcagctgatgtctcagccctccacggcctccaacagcttacctgagccagccaagaagaggtaggtcctccttagcagtgccaagtgtgaccatcaagggcacgtcaggagatcggggatggaggcgtttgtcactggtaaatgtctgtctgatggtattaccacctctctggatgtttgttgcatctgctgggtcctgtggggacaaaagtgatacatgtttggctctcatagtcccttgaaacttactaactagtttctttgtccaaggcttggatgactaactgcttaatgagaacattggaaatgctggtcaggcacatgctgttaccctttatccataggaagccacattcccttcagggaggccctgaagccctctgcccccactcaccctaccagtaccttgagttaccgagtcaccaccctcctcccggtgccactgaccttcccattcttcccgtcctctccctcctcttgcctgaaccatcgcagcagaggtgggggcagggctttctgcctcctgcctcctgcctttctgctgccaggccctgtgtggttgaattaatcttcacgaaataccactctgaccaaggtgttccttagtcagtcataaataacagcttctccctccattatagatgctcaggtctgagctttcgtcaagtctcatctgggccagcagtgcatcatcaaattctcaggtcctgctggagacctcacttgagagctcagggttggggcccagcagtctgtgtctagcagccctccgcccgttctccagcacactgcaggccacttctgctcccacgcccatctcttcctgtgttttgttttgtttgacaccttctgtgtgcagggctctatgggttcctgcaggctaatctctaggcatgggaaacaccgatgattacctggggcaggggaggaggttgggagtgactgataattcaaggtttcttctgaggatgacgaaaacattctgaaactagatatggtgatggttgcacagctctgtaaatacgcgaaaacccttgaattgtacactttaaatgggtgagctttatggtatataaattatatctcaatacagtctgctttgaagaatcttgttcttgtccttgggagtttgtagcctcttttggtgtttatgtgaccttggatacttaattttctcttggctgtatggcacgcgcttgtaatcctagcactttgggaggccaaggcaggaggttcgcaggagttcgaggcaagtctcctgggcaacatggtgagactgtctctctctctctctttttttttttttttttttttgagacagactcttgctctgttgcccaggctggagtgcagtggcgcgatcttggctcactgcaacctccacctctcaggttcaagtgattcttctgcctcagcctcccgagtagctgggactacaggtgcatgccaccacaaccggctgattttttgtagttttagtagagatggggtttcaccgtattagccaggatggtctcaatctcctgaccttgtgatccacctgcctcagcctcccaaagtgctgggattacaggcatgagccactgcacccagcctttttttttttttttttgaaatggagtttcgctcttgttgcctaggctggagtgctatggcacgatctcagctcacctcaaactcagcctcctgggttcaagcgattctcctgcctcagccttccgagtagctgggattacaggcatgagccaccaggcctggctaattttgtatttttttttttttttgagacggagtctcgctctgttgcccaggccggactgcggactgcagtggcgcaatctcggctcactgcaagctccgcttcccgggttcacgccattctcctgcctcagcctcccgagtagctgggactacaggcgcccgccaccgcgcccggctaattttttgtatttttagtagagacggggtttcaccttgttagccaggatggtctcgatctcctgacctcatgatccacccgcctcggcctcccaaagtgctgggattacaggcgtgagccaccgcgcccggccaattttgtatttttattagagacagggtttctccagcctgttggtcaggctgatctcgaactcccgaccttgggtgatccgcccgccttggtctcccaaagtgctgggattacaggcgtgagccaccgcacccggccctttttttttttttttttttttaaataaaaattatttccccaacctctcatgagctcctggagtatagtagctagaccgggagcctgttccattcccttctggggcaggcactgagcctttaggctagctagaggccccatagatgaggcttggcagaaatgtgctctgagctcctgccatcagattgtcacattttgcagagtgagaggagttccagggcagtcttcctttatgtggcttattcccttcagtgatgtcctcaaaggtctagaaaggtggacctgggtatataggatgtctctcgtctccccacagcatagagctgaggttagaaaaagacggatgttttactacatgctgctctttttcactgtggcccagtcctcagaggaaacatgggtttcttattatagaaaagagagagatcagattagatgaaaccaaatcccagaacttgattttcaacagattccaaggaactgtgaatcctgataaattccttggccttttttttgtctacttcaaaaattggaaaacaggtgatttggagaatatctttagattttggcagtttgaaaattaaattcagctatctagtaagtcagaaagcagaaagaggtttttttgcttctgacttttattgagatctgtttgcttttttgcattttggacagtaacgctcatatgtggaaagtgcataacaagatgaatgaaagtattagtcagtgggttggtgttttaagacactcaggatcaaaataattgttacttcatttaaaaagtattatcaaaactctctagcatattttaaaatagcagtgttagctctgataactaataatgaccactttctaataatttgatcattttctttagtgaagaactggtggctgaagcacataacctctgcaccctgctagaaaatgccatacaggacactgtgagggaacaagaccagagtttcacggtaacagcttgtgtgagactcctgcgattccatgtcctttctttctatggcaaaatagaagagaaaatggaaatgcaatctggcattatcctcaacctcagtgtttgtttgtttgcttgtttatttgtgacagggtctctctctctcacccaggctggagtgcagtggcatgatcttggctcactgcaacctccgcttcccgggttcaagtgattctcatgcctcagcctcctgagtagctgggactacaggcgtgcgtcaccacattcagctgattttttcagtgtatatttataattttctagtacacattttttattattcataataatagtgatgtctaacaattattgaaggcttacaactacatgtatgcattatcttatttaatccttggaacacttaattccgatgatgaggaagaaggtagcattgttcccagaagcctgtccccacctgcaccattggtactactgctgagtatttgtgtgttgagtgctgggctgggagcaggaaccagccatggccttgtcctcagggccttggagcttagtggtaggtagtactagttatgagaaaactagccaagttacaggtacattaagacaaagcttccattgttgagagaatcctgcatcatttgcttagatctttacatggcctttacctgctaatcacttgctaacctcccctaactttaagcttttggaagaattacaagggataccactgtgaattgcagcctttgctgatgtagtcgcatgtcctcctccagtctgtggacattctatatctcttgctgctctcctcctcctggcatgataatgttttgatcagttcattgcttacttgcatgtctgtgggaggaagaggaagtctcatcaggccaagtcatgtggtgaggctggaaatccataactgagattagctacccacagtgagcatgggagtgagtgctgtgagccacagtggtactgacgtcgactttctaattcccacagtcacagaatctcaaggactctgagccaattcaaagaaaagatcctgtacagtttgaatatgtaacttagcttaagagtaccctgcagtcacaagatttattaataaaagggtttggctttttaatttgtatttgtttaatttatttgttttatgcagcctgggtcttgctatgttgcccaggctggtcttgaactcctggcctcaagcgatccgctcgcctctgcctcccaaagtgctggaactataggcatgagccaccatacccagccaataaaggggtttcaatatatttctttttattttttattttttgagatggagtcttgctcttttgcccagggtggagtgcaatggcacgatctcagctcactgcaacccctacctcccaggttcaagtgattctcctgcctcagcctcctgagtagctgggactataggagcttgccaccacgcctggctaattttgtatttttagtagaaatggggtttcaccattttggccaggctggtctcgaactcctgacctcatgatctgcccaccttggcctcccaaagtgttgggattataggcatgagccactgtgcctggctgggttttagtatatttctcaattgtcctgatttcctcctgaagaggaaaaataacctgaaatgtgttggtggctgttgtttttttaacatgtctgttgactttcaggccctagactggagctggttacagacggaagaagaagagcacagctgcctggagcaggcctcatgatgtggggggactcgaccccctgacatggggcagcccatagcaggccttgtgcagtggggggactcgaccccctgacatggggctgcctggagcaggccgcgtgacgtggggctgcctggccgcggctctcacatggtggttcctgctgcactgatggcccaggggtctctggtatccagatggagctctcgcttcctcagcagctgtgactttcacccaggacccaggacgcagccctccgtgggcactgccggcgccttgtctgcacactggaggtcctccattacagaggcccagcgcacatcgctggccccacaaacgttcaggggtacagccatggcagctccttcctctgccgtgagaaaagtgcttggagtacggtttgccacacacgtgactggacagtgtccaattcaaatctttcagggcagagtccgagcagcgcttggtgacagcctgtcctctcctgctctccaaaggccctgctccctgtcctctctcactttacagcttgtgtttcttctggattcagcttctcctaaacagacagtttaattatagttgcggcctggccccatcctcacttcctctttttatttcactgctgctaaaattgtgtttttacctactactttggtggttgtcctcttttcggcaaagttggagcgagtgccaagctctccatctgtggtcctttctgccaagagcgactcatagtaaccaggatgggagagcagctgccttattctgaatcccaaaaattacttgggggtgattgtcacagaggagggacagaaagggtatctgctgaccaccagcctgcctacccatgcccatgtctccattcctgctcaagcgtgtgtgctgggccggggagtccctgtctctcacagcatctagcagtattattaaatggattcattttaaaaatagctcctatattttgtaacatgtctcaaacactcatactgggttccacaatccactgttagaatacctatggttagggcttctgaactaaaataatggaaaattttaacaatttgtatagtgcctggatcattactagtgccataaccctgcttcttcaacatttcacagaacttctcttttatataaaggcaagagcacaaaatgagttcagatgatcacaaacaggtgagttttgttggagaagaaagttggagtaggagactttcacaagtggtttccatggagatagaatgaagcattctgtggtcaagtaagtttagggagctattcatgtttcacttgctttgtggagattcacactatgcactgggaaagtatctgaaaagtcttataataaagaaacaggcttaactttgtgtaagaacactgtttatcaatgtcatttggctatagaaacattttctcctgctgattgtgtgtgtgaaacatgtattaacattccaatgaactagcatttaataaagcacaattttggaaaccctggtaaa

SEQ ID NO: 15 - DNA, 23892 bp, Homo sapiens
gagagttctgttgctgcggcggggcctgcacgttgactgtgggaaactcggtgagcgggctccgcgcgccgggctgggctccgggaccgcggaggctccccggcccatcgacgagggagagaggcgagcggcgcggggaggcccgggggccggggaatctcggggcccgcagcctacctgcgtgtgagaggcaggggcgaggggaaaccgggcggcgcctctagaagctggtctcgggggcggggcggggggcggtgaagccccacctggaggagcggccgggatgggcctccgggacggtgtgccaggccggggccaagtcggaggcccctcgctctgggtgggcgctggggcccgcgagggctactgtaaggacccctggcttctgaggatactgcgtctagaactttctccgtatggggccttgaggtgcttggtcgagacctgcctttgcgcttggtcccgaatcctgccctctaggagtcgctcttgcgggcctccagcccaccggaggcgaagcggccccgggcggaaggccgctggatcctcgagggaggtgccggtttctctccgcgggcgccgtggggacggtgggaggcgggggcgtcggcagcgcttggactaggtgcggccttgggcctgcctggtagcggggatttgggcccgcagagcgcccgcctctgcggctgagttctgcctggcggggaagggagcgcccgatgggtgccgaggcgtcctcctcttggtgccctggcactgctcttcccgaagaacgcctttcagttaaacgggcgtcggaaatctcgggcttcctggggcagggatcgtcgggagaggccgctctggacgtgttgacacacgtgctggagggggcaggtaattgaccagcgaacggaagtttgtggggcctgtgaacgctgctggccaagaggccctgccgagtggagccctgcttccgccagcgcatcagagactttgaagcaaagtgcagggggtcagggtggagagtggcggccccagcctcgcagggtaactgaactggatgttcttggctgcccagcgcttacaagtcccgtaccttttgtgccctgccaggaaacaagctcacatcttcctgtgggaaaccttctagcaacaggatgagtctgcagtggactgcagttgccaccttcctctatgcggaggtctttgttgtgttgcttctctgcattcccttcatttctcctaaaaggtatggcctatggagcaagcaggcgagttaggcaggagggtgcctgtgccctagccctgggactggtgtgtgcagctggtggaccctggaattgggacccgatggaacaggtagaacctgtctggggtgggggtggcaggggttgtgtttgttattgccaacccttcccagggttctgcttcgtcatgacttgctcagttccttttcctgtgtcccctgccttctggtcttcagaatgcccccgagaggcaggaagatctatgttacagttctggaaatgatgccctcccacccactcttggtccacggggtgctgggatggtagcgtgggattcggaagacttgcaccactgggtcacgttgttgctgatttggtgactcttgtcctcctaactagtctcactggtattgcgcagtggctgcatgaacattactcagcctgtggaggatgaagccatattcccttttaatgaacagaggacctgttaaaagtgaattggagattaattttaattatgtataatacctgaacacatccctatttaaattacgatattacaaataaggccaaatctccacaggtatttttaaaagccgttttttcgtgaaaaattatctttgatgtgataccatagaaagtatgcagtgctgtctgaggaggattcttgtagaaaaccacaccttcgtacagttgacaagacgtgcagagatagagggccccggggagctttaatctgggaagctttagaggacagacaatctgatttctacacaaaggaaactggaaaagcaaatgaaagagggagagggaagggggagcttccagaataagctggatttaagacgtttatctaccgaatgccaaatcggtaccttgttgggtccggattcaaacaaatatcattgccttcagtgattggcatattcaactctagccctgatgatgagggcttcttgttgatttgaacaatatgtaaacacttctgaagtctcttcttagagctgcatcccaaagcatttgtggatggaaatgatgtgaggtctggggtccatctcatcataacagggtcgggggatatagacaaaccaaggtttatcatgtggaaagacagtttaaagaaataacgtgtatggggcaaacatttgaatattacaaaggggagtacaatgaaaagtaagtttcccttttcagagactaccagtatgttttctttttgttgttgtggtttttttgtttgtttttgtttttattttgagacagagtcttgctctgtcacccaggctggagtgcagtggtgtggtgctcggctgacagcagcctccacctcccgggttcaagcaattctcctgcctcagcctcacgagtagctgggactacaggtgcctgccaacatgcccagctaatttttttttatatatatatttttagtagagatgggagttcaccatgttggccaggccggtcttgaacttctgacctcaggtgatctgcccatctcagcctcccaaagtgctgggtttacagacgtgagccagtgcgcccagccaactgcccacgtttaagattagttttccaggctgggcgcggtggcttacacctctgcactccagcctgggcaacagagcaagactctgtctcaaaaaaaaaaaaaaaagattagttttccagacattttgatctatacgtggaccagcatctttttttttttttttttttgagacaaggtctcgctctgtcacccaggctggagtgcagtggcgcgatctcggctcactgcaacttccgcctcccaggttcaagtgattctcctgcctcaccctcctgagtagctgggattacaggtgcccaccaccacgcctggctaattttcgtacttttagtagagacagggtttcgccatgttggccagtttggtcttgcactcctgacctcaagtgatccacccaccttggtctcccaaagtgctgagattacaggtgtgagccattgcacctggccttttttccaatagtcttgaatggatgtcaaattagagaattgcaagccactgaggctgactttgcatgggctattcggccattggagaagagtacaaagctggatttccattttgctcagggccctagagctcgtgtgtgtgctttctcttcaactcctgtcctttttgtcttcttcacagatggcagaagattttcaagtcccggctggtggagttgttagtgtcctatggcaacaccttctttgtggttctcattgtcatccttgtgctgttggtcatcggtgagtgagctatggctgagggcagctacctgacctagaccctggtctctgctgcaaaaccctttgccacttttgatgtgtagcatccagttttggctgctaggagacagaccaatgaaatgctgtgtctttctcttgagggagggaagaggctccctttgcccatgctgctgaccgctagtcggttcttcactttgaggcccctctaggccgtacatggtggctcatgcctgtaatcccagcactttgggaggctgaggtcggtggatcacctgagatgaggagttcgagatcagcctggccaacgtggtgaaaccccatctctacgaaaaatacaaaattagctgggcgtggtggcgggcacctgtaatcccagctacttgggagactgaggcaggagaattgcttgaacccacgaggcagaggttgcagtgagcctaaatcgcaccattgcactccagcctgggcaacaagagggagactccatctcaaaaaaaaaaaaaagaggcccctctagcagtgggcgtgggcttataccaagcagtttgtatgcagcttatgacggccaccttacattgctttttttcaagaccttggaaggagggacgcctaaggtttctgaggctgctcctcaggtcactctagaactgaagccaagagaagctaactggcctgtgaccttggtctgagtagtgctgctcaccagtcacttaaacagcagaattgcctggagcagggcctctaatgggggactgagcaaccaagcacacagtgaagtcctgccattccctgtagtagtaggaggagaacacagagatgtgtggcagcatatcttggggagagatcctagacctctctgcatctgggctagacttgaggttttcccaggtcgttccagctctgtagttctgtaaactctgacattgaggtgtacactagcaggtgcttgaaagataaactggtccaagggcaagcaggctctgggataaggccaggccaggtggtggtaagatgaaaggcagacattttgcaatgaggtggtagggtgaccatctggagacaagaatcaataaagctcttgtctgactggtagatgtttgttgttttgctgtggtaagtgatcgatatgtccccctgtttgggctccaaagtattggcttggctctgctgtggacaccactcttgtctcagagctgtggtgcctgcctaggcgtggaacactcctcccaccgagtcccagcagaaacactgagcgggtggggggctgtggttcaggggaatgtgcaaagcctcacccaccagcttcagcattaggcatttctccttcctgatgtctcagagcctgataggatatgttcaggctggactgcctctgaacaggccaagtgttacctgacagcttccaaccacatagggtaggtgccagctgcctgagcacctcagtgttcttgaaatacttggcaaggccccaagaggtagtagctctttctaaccagggttctcgccctgagcagcctccaagccaggagtaggtaggtaatatatgtgtcatccccaggccactgagtttttgaactgagcatgtgtgttttggcttttgggtctggggtgggggtaataactggggaggggagggaccatgctgaggatgattccctcagggtcttgccccttccccaaaccagaaggagtatgtttctttcctagagcagctgagtgggctggagagatcctttgcggaatccagtagttgacaaagccttcattcttttttgggatcggggaactgcttggaagttctagggggacatatggccatgatgactggctgcttcctactcccatgttaagaagcataatctagaaagatctgcagagccttcttcaaacagaagtgttagtcacaggtactagtgaagggtaaggggcataactagctagagctgtggccttgcttgggggtggggagggttgagcagatcctcctggaggatggagttgctgagggtgcaggatcttcccacctgggctgaggcccgagacagggagggctggtttctactgtgggacttgggttagtattgctcagtcccccatccccactattggtcattggccaaggtggtccttaggatggtggggttcctggatgcaggtgacagtgtaaggaaacatgtttatcttgtttttctgattacaaaaataatgggtaattattcttaaaaattcaaaagttgaatttagaaagttaaactccccataatcccatttcccacaggtaaccatcatgagtattttgttgtgcatttccagaggggttttgtatgctgacatctttaataaaatgtctacaacggtgggatcatacacacaaagtatttatgtttctttccacattcctgctgggacatggcaggaggagcattccacgcctgagctggtagcacagctctgagataagactgctgtccatagcagagcctagccaatactttggattgtgctttttctacctgctgcacgttagacatcttttttttttttttttttttttgagatggaatctcactttgttgcccagactgcagtgcagtggcgccatcttggctcactgcaacctccgcctcccaggttcaagcgatttcccctgcctcagcttccgagtagctgcaggttacaggcgcccgccaccatgcccggctaattttttgtatttttagtagagacgaggtttcaccgtgttggccaggctggtcttgaactcctggcctcaagtgatccgcccacctcggcctcccaaagtgctgaaattacaggcatgagccactgtgtccggccaacatctttttatagcaatctcattcttcttaaagatcatgtagtattctctcatgtggttgtgccgtaatccattctttataagcatcttcgaatcattgcaaatttatgcaaatacttctgtgggataatttcagaggtgaattgttgaacccgagggtatgaacattttgcattttatacaggtgtgctgtttttacccctgctaacagcgtttgagagtactcgcttcgtggtgctgagggatgggcagatttttataatgcaagatcaacataaaaactaagcagcctaaaaccggaaattaagaaccccatgaggccagtgccctgactcacgcctgtaatccccacactttgtgaggctgaggcagttgcttgcgctcaggagtttgaaactagcctgggcaacatggcgaaaccccgtctctaccaaaaatagaaaaagaaaaaattaactgagtgtggtagcacacacttgtggtcccagttactggggaggctgagaggtggaggttgcagtgagctgggatcgtgccactgcactcaagcctgggtgacagagtgagaccctgtaacccaccatacaaaaagaacctcgatacccatacagtgataccttgctcctctcatatgggagtctattaagagcattctttgggtacatcttagtgtattgacttaaaacgatgtctcaggatgcatggggaaaagcagtaggtttggcgtggctcaatttctacattagagacaaatataaatatatttttaactggagctctatatgtctaacagcggctctttcaggagcagaggctgctcactgactcagcaattatttcagtgcccactctgcacccagagctatcccaggccctgggaatatagtataaaagatttctgctcttatgaagtttgtagtctactttgggagagatggacccaaaaaatgtgtttaaagagaatttcagagatggatgtctattacgaagcaggtaacagtgtaatgtgactaaaaatgactttagatgtgaccacatttttattgtatatactgctagatgtgattatgttatgggatcctttccgtttctacattttgggtgtgtttgaactttcgatgagtgtgaattcctttcgtaatcagaataaaacattatagataataaaacccattgtaaagctttgaaatgaaacccttgactcctagctggtatcctgcaggtcttgactcctatttttttgtttgtttgcttgttttgttttggctttttcgagacagagtctcgctctgtcgcccaggctggaatgcagtggtgtgatcgtaactcacagcagccttgacctcttgggctcaagcgatcttcctgtctcagcctcccgagtagctgggactacaggtgtgcagcaccatgcccagctatttaaaattttttttttttttttttttttttttgttgagagagagtctccctgtgttgcccaggctggtcttgaactcgttggcctcaagcagtcttcctgccttggcctcccaaagtgttgggattacaggcgtgagccaccacatctggcctgggtcttgactcttaagcaccttaggtccccggagcaggcatttccatctccaggttcaacttatcattgtgggggttggggggctatgggccaacttgagatgaacagaacaagacgcggtgagggtaccatgggaaaaggaagccacccccatttccagaaactctttaggcttggttagcatcgtgaactgcagagcaagcctggggcctgtgtagaatggggccagggattgaaaagctggaggaaggagtgggtctgagggtgggagcttccttttttttttttttgagatggagtttcgctcttgtcccccggtctggagtgcagtggctcaatttcggctcactgcaacctccgcctcccgggttcaaatgattcttttgcctcagcctcccgagtagctgggattacaggcgcccaccaccacgccgggctaaattttttttttttgtatttttagtagagatggggttttgccatgttggccaggcttgtctcgaactcctgacctcaggtgatctgcccgcctctgcctcccaaagtgctgagattataggcgtgagccactgcacctggcctgagggtgggagcttctgataacagcatcccatgaggggtgtatgtgcatagaagtgggaagaactggggaggcggatttgagggaagtgagtctgacctgtctcatgccgcctgtctgcctggtatggccttatcttgccctagtgtccgctaaatgcccgtgtctcctctctgctccaccacagatgccgtgcgcgaaattcggaagtatgatgatgtgacggaaaaggtgaacctccagaacaatcccggggccatggagcacttccacatgaagcttttccgtgcccagaggaatctctacattgctggcttttccttgctgctgtccttgtgagtggggggttgagggggcaggtgctgtgaaaggagccatgggctagccatggacaccgagctcagtgggctcagtctcccccctgtgactttgattcctcctcagtctgtggcctggatcccaaagccctgtctgtgttagggaagccacatagttttctcctgacctccagaggcagcgtggagagtaggagagggctgcctgaaatatcagaagaccctcacacaccacatactctcaggcaaacagatgactatctcacggtctgtttgcatggagagtgagatgtaacggtaaggccttgccctcctctgggagaggaccttcagagtccagctcacaagggagcgactgaatgggggactctttgtgtccggggtgttgacctagggacagcaggtaaaagtggcacgaagaggctgggcctctcctcacctcagggccttccccacgtgaaactcgtaatgaggacatgttacattccatggcagccagagtatttctgatgatttttttggtaaaactaagtaccttaatcaaggctaagggtaactagtcgggcaaaactagaccactacgaagtgcctatttgagcctggggccctgtttgctgcctcctgcttcacatagccgttctgatcagcagggcctggctgggaggtggatgggagctcagaccatgtatgaaggcattggaaaggcgcttgctttgagggtggagctctcatcacttaatcacttctcaaaagaccccacctcttaatgctacggcagtgaggattaaattccaacacatgaagtttgaagggcactcagaccatagcaccaagtgattctcaggctcatggacagttattccccacttggttttgtgccccgagactcaagaatctccatgcctaggagattcttgctctctagtcacctggtgtgtcctgctttactaggcgctacgatgactacttgtcttaaaatctgttgtttagatgatctggtactctctgcgaccaagttggaaagaggggtggagctagaaaaggcaaacacatttttttcaagataatgggtttgatcacagatttgatctacaagcttgctgtcttcaaacttaggaaagtcaggaaggctgggaggagtcagacacataccctaaatttttcaggaagttccaaacaagtattatcttgtggtctgaggctgaaagggaagcagatctgaaagactgagtctcaaacccagaattctgagtgtgacagtcagcaaaatgaggaaaaaagaccacattgagagggaaagagaggaaactaggccatctaccagaaaagcatctagagctttaagaatggtatgggggaggggtgggctgggtgcggtgacttaggcctgtaatcccagcactttgggaggccgaggcaggtggatcacctgaggtcaggagttcgagaccagcctggccaacatggtgacacccagtctctactaacaatacaaaaaaattagctgggcttggtggtaggtgcctgtagtgccagctactcgggaggctgaggcaggagaattgcttgaacccgggaggcagaggttgcagtgagccgagatcacaccactgcactccagcctgggtgacatctcaaaaaaaaaaaaaaaaaaaaaaaagaatagtatcgggaaggtgaaaacctgccgggagctctgaatcatgaaagacatggagaagtgaggagaaggcagtcccttttatatgtctgtgtaaggaaggagatggagggtaggtggtcaagggcaaaggaaacactaggatgagaaaatggaaattacaggtgggcaagagtggcatccctaaaggatgtacttgatgagattatgtccagaagctgttgagatcatctgcagaaggcattgccaccgatgcttgaggatttgcagagtgggagagatactggcagactgcagcctggcaaacatcccaatttccaaagggaggagaaggtagatgaggaattgacctggggagggttgactttgatctccagccatgctctagaaagaatagcttgtatgcttttggaaaagaagagcgggatcattggtgactgctgtgaattcctggagaagttctgtcagccttctatagatggagtgtagatggatttttagcatgatgcttgccagtctgagtctgttcttaacgaccagatgccgaagtgtggggaaggtgctggcagaacagtgtagttaggtgtggtcctaacccacatgagtggctgccatgtggattggctctatccacacatacacatagaagccttagggggctcactctttttttttgagacagagtctcactctgtcgcccaggcaggagtgcagtggctcgatctcggctcactgcaagctctgtctcccgggttcacgccattctcctgtctcagcctcccaagtagctgggactacaggcgcccgccaccatgccctgctaattttttgtatttttagtagagacggggtttcaccatgttggccaggctggtctcaaactcctgagctcaggtgatctgcctgcctcagcctcccaaagtgctgggatcacaggcgtgagccaccgcgcctggcctgctttgttttttcagtgtttcctgcaagctgcaaatgggctgtgtggccataaggctggacaagagcatcacacagaaagccaaggtcctctagggtcacagccaccatcttagatttaactcttagactagcaaggagtatatatttctggcaaaattccagaaatgattaactagatcgcttatgggcaactggtgaatccacactgatctctgggatcaccgtttccttttctaagaagtcacgcaagaccaacctcatggcttttttggatcaggctactggatgggaacacgggagagtgcggcagctgagccaccacgcccagcctccacatgctttttaaaaacattcccgtgtttaaaaaaagttaaccacggggcttttaagcaccacatgctttaaatgccccttggtgacttgagtgttctactcagtttatcatgaatgtttttctgggacaactgacctgtttccagcatatttatttatttatttatttatttatttattttttttgagacaaggtctcgctccatcacccaggctggagtgcattggtgtgatcatggctcactgcagccccgcccttttgcctcagcctcccgagtagctgggactataggcatgtgccaccacgtgctgctaattttttaattttttgtagagacagagtcttgctctgttgcccaagctgatctcaaactgctgggctcaagaaatcctcccacctcatcctcccaaagtgctaggattacaggcatgagccactgtgcctggcctctccagcgttcttgagtgttcttgagtgtctacccaattcctcattggtggatgtcgagcctgcagctctgtttctgatgtcataaacagtggcctcagctagtcagctttctttgggcctcctgatcctcttggagcacccatgccactcctattatctgtctctttcttttttgttgctgttgatttttttctttttctttttctttctttctttcttttttttttttttttgagacagagtctctctgtgtcgctgaggccggagtgcagtggcacagtcttggcttactgcagcctcctcctcctgggttcaagcagttctcatgcctcagcctcccaagtagctgggactacaggcacatgccaccacgcctggctaatttttgtatttttagtagagacggttttgccctgttggccaggctggtcgtctctgactcctggcctcatgtgatctgcccacctcggcctcccaaagtgctgggaatacaggcatgagccaccacacccacctctctttctttccatgttctttatgtcccactgagaggctcagttcttgaacgcgagcaggtactcatggcgcgagcaggtactcatggcccgagcaggttagatggttaggagttaagggttccagacttcgtatgcaacttttctgcgtggtagagagcctgcctagtgggtattccagtactgctggcatgcagtcacctgtgtggattaacattttgcaagggtgtatgggttggagtggagcaggagagcctgaagtggggagaccaagttggaggttgtcagtgagacttgctgggaacctgaacgggggcagtggtacagtggtagtagaagtggggtggaggggacagagctgagaggcccaggtggagttgaatcagcaggcttttccagtctctgggagtctgagatgatcttggttctgctgtggacttgcggaatcgaggacgcagccccctgctggaaagggagctctggctgcccatggagtaacactatcgtgctaggtgtgagggctggttgcagagtgggacttctggccaggcctgggggcagcaaggaaaggaggggacagggagagcagggttgagcaggggaggcctggcagatgagcaggatagggtgcttccgggcagtcgagcttgggttgctggcttcagaggcattgaggccagggcaaagggaatgtgctggcaggatggattccagcctccagcagagcgatagaagatcggggagcagaaggaagagggaagcaagatcaagaaggaggatgtgagcaggttagtggccaaggaggggagcacattctggagaaggcctggtgcttggcactagttttcagcgggactgggctcagaacacataggaggttagcctgagagctcccgagtagcctttgtaattgggaaagggggcctggcctgaaaggaaacatcacacctagaagcaagtctgtacccttggccccccatagtctgctgctgctgcctgggatagcagtgggagagtcccagcttcccagccaaagccttctgagcttttgtcctgcctctgccactactgtctcagtcctgtcacttgacccagaagcctggggctgctctgccctttcttcttgtcccatgtgactgcccaaccatcgtggccatttctcagtgtgtggcccagcagggtgaggcgctttcacggtgtcaagtagccaacctccagaagtcttcagcctgcagagctggactccacccatgaaacagcctgtagatgtcacctcctaagcctctctctcacaacccttgggaccactgctgtggtggggccaccaccatcccgtatagaccaagcgggctccctgccacctgccttcccccctttggcctgtgcaccccacttccagtggctcgctatcacatggatcctccaggacgcggctcccccacagtctctgcttcggcctccccctgtcatgaagcagtcatgtgggtctcatgggagagcctcacgtaacacatgctctcccccaactcgattctctgagcattttggggacctctgtgcggaacaccccctccagctgccggcccagccggcacctcctcttcgtgaatctccgaggcttccctgtggagcctgttccgaggggcccacaccatgttcccggctgacccatagcgctgtcctcgggtcccagggcagcctgcacacgcagctctgaggtgtggcacttggcagggttgcccatcgtggaaaacctgggctcttccccttcagactgttcagctcagtgccaagggcctggcacatatgaagggcgctgaaacatttggtgactgaatgggctgtcccgggctgacggcgacagctttaggtgcgtgcctgggttgaacttgttgggctttttagccaagaagcccagcttttcaggtcttaggagctatgacagtttgtgaaggcgggtccatcggggccacctccaggggaccacactggatgagccactggtttccacttgtggaagactccggcagtcgctcctgttcccttcctgccaaccttgcacttcgggggcacagctagcgagaggccctcttgagtcttggagtgtgttggggacggcagctccctctgggctggggtttgtgtgttcagaggacctgcactgccttctctgccttactcagcttaaatgacggtcaaggttaggcccaaagtgctggttagcagccagtcgcaggaaggcccctgtttgtgtggaagccccctgaatttttgctgacctgaacttgatccacaggcatcttttgtttcctctttacccctccagggtagaatcccatcgctgccattagcccagatggagctgcccgtgcttctctgctgagctgctttttcttcttttttaggttgagtcatctaatcacagactacctttgcctaagttgtcttacctcagtcggttgctctctaccctccagcttaccccaaacccctcagatagctggttttaaaaaagatacacagcaaaaccccagaaacccagctggtctgtgtcacttgttctcaagaagaagggaggacaggccagacccacacctgcccctttgccctgcgcttagtgcactgtcctcaggatgggtgagctccatctgggtcgtgggctggagctgccacaagtcatgttctcatttgaaacggcctccatttcccccagctctagccctcctcttcccgtcttctccagcgtctgtgtgctgggaggctacagggaaggccacgcagctgtaccaaaatggacttggggcagccctttggggcagccttctcgggtctgctctaggtgactctcccagttgtaacctgttttcctgattccagactggtgggtaagagtcgctgagggcagtggaagccctggtgttagtcattcttcttcactgaagccttcctgaggcgtcacctgacttgcttccttgcctgggcgctgcctcattttttttcttccacagctggggcgtgttcacccagagtccactggccaccctgcggtaggcctggaaagtcagcaggtggcgctgggacaccggctttctgccggctgggggctgaggagtgagcttatgtgaacaccatgtgtatgcaggggctgggggttgaatgacttgactcgcctgaaacccgtcagcagggcgggccgggggtggccacagcatggaatcttttggtcgggacttgctccttctccatttcctattaagcccgtgtcctcttccccttgctcatgggggaagacagggctgctgaaaagtgcttatgagccatggctctctccatttgatatggttggccctgtttctctagtctgtggagaggttctgtttctcctgccttctctggtttactcaaccttttataaaagcacgatagccctgctcagtgtccaacaacattctatcaagaaagcccagtcagattgaggcattggggctgccatgtgtcttccaaggccacatctggattctgttaagtttcgttcactggcctttttttggaccccaggccattctattggtgaccaccctgtatctgtaggagttgcctttggctcttaggttctttcctgttttctggaaatgaatagctaagaacagtgattcgggtaagactacttgggagatccagcagaggcagaagctaaaggccatgttcgtgccctgtcctgggggcctgggaagctacaagggaacagacaagcgcacgttaacgtgcctgagtgacccagtgtgagggagcgggaaaatgttctagaaggctggctcccaggctgaaaaatgccagtgatcagagaggacctggtctgcattgcttgggccctgggtgggggttgagggtgtgaggatgcagaggctggagctctgggttgtgccttcaggtcgcggcagtgaatgttttttccccctgcagccatgagcctggcttgcccatcagaacgggtctgagacggcgccttcccactcctgtcttctgtctcctctgttgctagactgagcagctctgtgtctgcctctgcccctcttggtgccaggctcccaggtgaacacaggtgcagtctaggcccagggagattctgtccagccttacgtgcagcctcaaatctgtcccctcacctgtcagggagcatttcctctcctgggagtgggatccagtcatctggaagcccagccccgcgccctccccccctttttttttttagctatacttgctggagtgggcggaagaccccttttcagtgtgccaggtatgggagtgcagagatgaaggcacagtgcccagcctaaagaccttcatagcctggtagggcagccatataaacggatggcagccacgcagagaacagagaatgaggtagttacatgcgggtgcctggggggctgctgcaggagcccccagaaggcgtccctctgatggggtgggagatccaaaagggtttctggggggaggtgaggattgagctgggtcgagaggacattccggcctggagaactgccacacagagccaggcgtgttccaggaatggtgaggggttaggtgttactagagcagggggccacgtggttagtgaaggaggagagctcactgagggcatgcgtgctggcagcaggtggcttaagcagagggctgacatggtcggatttgccttgctctgggaggtggatgggaaagccgtatggcagcagatagggaggaggcgccagcagtggggatgatggtgggcatgtttgcagttgacatggaaagtgctgggttgtggcttgggctgggggccaagagggctgagtccaaggcggtttgcctgcccaccactacagcaggggctacacgaggtggtcaggtcaggcaggacaagggaaggcccgttttggacaagctgagtctagaatgtctctggggacatccaggagccaatgtttagcaggaggttaggtatgagtctgggccacagagaaaaccctttcggggataagagtggctgggaggaaggtatagggtgtcagctgaagagtgcagaccccagagggagcagaataacagtgggaggagggtgttgcgaggggacctcaggagggtaacttagcagcagagcaaggagttcagggtgacctccggcctgggcggttaggaggccactggtggccctgctgctggcttggaagggcaggccttggccagcctaggttgaggaatatatgggagggaaaagaccaggggcttgggcagggtgactccaggaaggaggcagttgaaggtgaggttcctggggggagaatgatcccgggtcatccagcaggaagagagaggacctagaaggtgtgaaaaagaactatcgggctgggggtgcagtgggaggagtatgcccggggtgctgtgggggtggggagcgcctgtgagggttggcaagaggaaggggaaccggggcctggcagaggggagccccagactgtctcaaggctgggaactgaaggcctgggctggggctgagcagggccaggctttcggacacacacagcgtggatcttgcgctggactttgtgtatgccctggcctatcttggaagccctggttctcaatagccgggaagggcctgggacggtccgaaaagagctgggcctctgctgcactgccgcggaagcatttgtgttagctatctccctgggtactggggtgacagccatgggcactcaccagcagccgcttgcctggcctggtggcggggagtatagccttcagtcttgcttggtcctctctctaccaccaggtggcatgacccccacccctcaattccagctgggaggagcggtcctcttcctctttctacatcactgggatccgctctggggctgggcagctccttgccgggggcctgggtcttagtcagacttgcctttctttctaggcctctccattgacttctggccatgccgatgtgagtcagatgcattgtttctctctggctcctagggcgctcagtagcttcctccaccttcaggctgtagcccagtgcggggcaggctggtgggcagctgggggctgaggcagggaaacctgagccctaggccacgaggtcctgggccgctaattttagaaagcacatgtcactggaaactctccttctctgccaggaatcaacggcctggctctcctggtgctgccaggggcccctgggagcctctccccaaaccaggaacctcaggggtgtctcctggcccgggtgggtactttctgtcctgagtacatctggaaaggggctctgccgaggccctggagagccatggcttgggccagggaggtagctcaccttgtctgctctttactttctccagcccttccgggctgcccctggccatgagcagaggctgtgaagtgtgaaggcctggctggggcaggaggccacttcgactcttctgagtaagctgttgttgaagcactctggactaagcagatttgtctcttccttcccccaggccctgtgtgacccttgccttctgaggtgtgtgagaaaggaacccctgccttgttttgactgtttgaacgagtccttccctcctctcttcctgccagctaacatctcggggcaagggtgaaccaagggaaatgaagtggccattccaatctctgtttggggactagcatctgcctccagctgccacctgtttgcctgtctctcctggctgcttcagagaggcagcctgcgcctgtgtcctgattcctctacaccctccagcccaagaagacctcattcggggtgctgttacataacggatgtgttccagcgcagcctgcatgatgggttgggaaggaggctggccagagaagagagttctatcttacgttgggacctgggagctgttccctgttagtttagagagcagagtggttccgagctcaggttctggagtcaggcagacataatttggaattccagccatgtccatttctggtttttggccttgggtacattgatttacgctgctgaacttcagtttcctcttctataagctggggcagtgatagtaacttcctcatcaggtagatgtgaggatgcggcctggcatgttggaagtgcttggattgattagcttctctcgttaccttaccaaggcaagcccagcctcgcagggaggaaggtggtgctgtggcttgtctggcacgtctaggccccgacccggaaagtgccgcgttctgggacctcatgctgtagcgaggctcttcccagccccccaggctcctgcttccagcccctctgagagctgagggtggccgttgggcacagcggcagaggacggctcctgggccccaccttttccctcacgctgccagcaccaggttggcggcttctcactcggctgccttggcaagagggcaggtccaggctggagctaggtgtggagtgggagcaaccaggaggtgctcctgccagcccttcatgctctttttctcacttctcccttctttttgtaaataattgcagcctgcttagacgcctggtgactctcatttcgcagcaggccacgctgctggcctccaatgaagcctttaaaaagcaggcggagagtgctagtgaggcggccaagaagtacatggaggagaatgaccagctcaagaaggtgagcccagcttcccgacccaccatggggcgtcctggtgttacactgtgggagccacattcttcagggcctcagtggccactgctagcctgtcacgctgggaaatgtgcctgaaaagccagagttgggtggaggcgcagaggggaagtcctcagtggggagagtatgcctgctggaggcgtctgtgtgtgagggtccgggtgaggaggagggtgttgctgctctcgtttccatccactgcttccagttagacccttccctgagaaaaatggcccctcagtgagccaggccctctgctgtgatccgaaggccctcagctaggcccttgttccctgcaagattgccgcaccccctctggaactcggggtctgtggcatccctcagtgctggagaggaggtgggggcagggtagttggccagtcttagacgtcccgtcaggaggtgagctgcaaggcaagctcggagggatgtggatgcagaggtgggatagagctggccaggccgactgggggctcctaactgcagtgagcggcaccatgtagggagcacgaggcaccgccatctgtggaggggttggtgagcaccatggagctgctgagccctgctgcttgggaaggaggcagggccaggggccaggggccaggggccagggcaggcaaggcgtgcccggcgagctgcagcaggtggccccgctggcgcttctctttccctcggcgggcagccacgccctggcctttgcctaggagctgggagcaagtggtggctcggttccgcgttgacatttccgaaggggcgtgtggccagggcagcttgaggaaccgcagctcggtggggaggatggggctggaacctctccctccctccctcctgagtaaccctggcctttggcacttttcccagggagctgctgttgacggaggcaagttggatgtcgggaatgctgaggtgaagttggaggaagagaacaggagcctgaaggctgacctgcagaagctaaaggacgagctggccagcactaagcaaagtgaggctcgacctcgtgtccttccccgcagggaagtccagaggagcctcctctgcccgctgctgcccattttgtgccaaagtattagtaacaagccttgcacgcacgctcgagggctggctgaaaacagaccaatagcaccctgcgcctccaaccccaatgcagccatgcttagccggcaggccagtgaggctaagtggtttgaatggggctcaggaggaaccaggctgcagttggtgggcctcgattgccctgcactagagcagtgcatgctggggctttcccgtccagagtgtggcacggtagccccagcatgcctgggggctgagaatgaggggagtgtgggagtggcgttcaggaggggagtgggcggctcccaagcggcctgcctgtctttggtctcccacgcatagacttaagtctggggcgttttcccccaataccacaggcctcgcctgctgctgctgtgtgcaaggcgtggttgtcattgggtctcgcttgcaggctgggatcttgctccctgtctcccactctcagcctccctggaggttacccttgccgagagccactagagttcctctccattaaagggactgggggatggcctctgtgtttcttttgctttatcttgagcttttttgtcagccctttccctctactttgggggcctgcaaaagcagaggggctttattttgagaagtagcctcctgtataacctcgtttgagatagatttgggccagtttctggtgtctgtagcagtcgggttttttccccctaattcctgtcttttcgtttctgttttcttggtcatttacatcatttcaagaactagagaaagctgaaaaccaggttctggccatgcggaagcagtctgagggcctcaccaaggagtacgaccgcttgctggaggagcacgcaaagctgcaggtcagccctcccgtattgctgcgcccagggcaggagagcagagcaggatgaggcagcccctgcgggtgcggagggaaccttccaggggcccaggggctggctgccctctccaccactccccctggccacctctgccctactgagtgggacccttcaccgggcaggaggggggtggcctggcagcagatgtaggcacttgccaaggcggccctcaggagtggcactggctcactaggctctgagccttcctaccttcgtgctcaggcgcagccatggtttggggcctggtcaagaacaaagaagcaggtgaaactctgggacccactgctggccttctttcctagggtgctggggagtgacgtagggcaaagatccctgggcaagtgagggcacaaggtgtcaaaaaggcaccttccctagcaggcgctagttgtggccatcacctgctgccctaggcctgatctgagtcctcagactagcttgggtgcaccaggccgcatctggaagcccaggcggtcttgacgttgggagtgagggccacataaatactcctaactttggacagctggcctcagtgcttggtggcccaagtttgggcaccacagcaggtggggaggaagggtccagcctcaaagggggcacccatgccctctgtatggggcaggcttggcagatgggcttcgagggcacctgtcaaaggtgtgcagagttgggaagggtctgatcaggtcttgaaggggactggatgccttgctgttccctgcagccaggactcagcccccagtgaggtcctggcagtcctccctggctggcgttaggtccagggctttccctagagcgtgggccagggctgacgctcccaccctggcaggcctttgggtgcagctggggagggggccccttgttcacttgaatagctgttgttaggagagaggggaaccgaggtggacctctggggcatggggctggaggtggcaggggaggagtggacccggccaacctactgctgtgggatttctgtccctttccaggctgcagtagatggtcccatggacaagaaggaagagtaagggcctccttcctcccctgcctgcagctggcttccacctggcacgtgcctgctgcttcctgagagcccggcctctccctccagtacttctgtttgtgcccttctgcttcccccattcccttccacagctcatagctcgtcatctcggcccttgtccacactctccaagcacattacaggggacctgattgctacacgttcagaatgcgtttgctgtcatcctgcttggcctggccaggcctggcacagccttggcttccacgcctgagcgtggagagcacgagttagttgtagtccggcttgcggtggggctgacttcctgttggtttgagcccctttttgttttgccctctgggtgttttctttggtcccgcaggagggtgggtggagcaggtggactggagtttctcttgagggcaataaaagttgtcatggtgtgtacgtgg

SEQ ID NO: 16 - DNA, 14694 bp, Homo sapiens
ggggacgcggcacagatagggggaagccggagtaatggttttcgggcaagtggatgttggagagcacacacaggagttggggggcgggggagggcctggggttggggagggctcgaactcggggctgctgggtagtccaggagggcgcggtaaggctggggtgtcctggtgagaactggagaggatctacccgggtccctgcctggccagtggggaaacaccggtcccccaggcaccttcacctaaccagagcggggatttccaccgcccctcatgccgccctttggaggaaagtgaaagtgaaaggaggaagaggaggcttcatggctgaggaggtcgcagcgccatgaagtccctgtctctgctcctcgctgtggctttgggtgagcgaaccccgcgactcatcgcccaagaactagagggaagcggagggaggtggccccactggagccgatgccagggtgggagtggggcaggtcaccagacatacaaaccgctcctcactcgcgtccctatacgccaggcctggcgaccgccgtctcagcaggacccgcggtgatcgagtgttggttcgtggaggatgcgagcggaaagggcctggccaagagacccggtgcactgctgttgcgccagggaccgggggaaccgccgccccggccggacctcgaccctgagctctatctcagtgtacacggtgagtctctagggactcgccgcccccctacctctgtcgcctccaccgaaaccccctcctctttagatccggcagtgacctcaggcctcagcttcccctttgtaaagtgagtctcactacggggtagtctgtgcatttgaagttccccgaacgctgcccttccagcccctttcccggcggtgactctacagctgcaacttccttctctacactcagaccccgcgggcgccctccaggctgccttcaggcggtatccccggggcgcccccgcaccacactgcgagatgagccgcttcgtgcctctccccgcctctgcgaaatgggccagcggcctgacccccgcgcagaactgcccgcgggccctggatggggcttggctgatggtcagcatatccagcccagtcctcagcctctccagcctcttgcgaccacagccagagcctcagcaggagcctgttctcatcaccatggcaacaggtagctggggaggggaggtggagaagggtgggtagattctaagggtccagatcagccggtggtctcgctttatggacttgagcaagacatttcgccaatcggggttcagtttcctttttttgttaagagaggtggtttggctagaatgaatcaatctctaccgctccttctagccctcacccagttaaaaaaaaaaaacaaaaaaaaaactgcagcttggcagggggtagggggaaagcagggccgggcaggggggttactttctggtgtttcgaagggcggggctttgaagaggtggggtttcccgacaccagaccttgagagacttgtcaggtgatgcgaggtgggaggggttcagaagcaggagcgttttttctctgctcttcccagatctgtgtcttgctctgcaccctcagctttgcgggtcactctttcaaaacccagcactctatccccacctgcgcccacacccggcgctgcggcaatccgcaaagcaaaggctcttgcactctagcgcgttgaccttgcctgacagccccgtgtagggatgtgctgccgctctgtggtccgcaaacaggtgggctcgagtgggcggatggacgcggctggagattggatagctcctattgcactgaaaggtgcattgcagtttgaggcccaggagtcagaagcttttctaggctgggacgtgggagggactgtgcagataattcaagaatgaggagagtctgacctggatatctgggagctctccctcctggcagcggaggcggggtattccggggtagaataccggtagagttcttagcttttctatctggattttatgtcagcgacacagcccgatggacagggcaaccccaaccaatccctgcaccctcccttccctccaccctcctgagaattacccacagaaccagggagacagacttgaaacccacgctgaaaccctcacctctgcctatacctccattcttagtctcaagcccccaccctggcagaagctgaggaacactgctcttgtgtagacagtagctctctctggtggggtggaatatttcctagggctactggctccaccgaggtgatgatgagaatggtctttgctttctgagtttgtttttccaactgtaaaatgtggatactatttcccagctgcttttcttgttgtgactatcaagagatggcactgtgttaatttatccattgattcaataaatactttttagcaccaagaatgagttaggactcagcagttctcagtccacactgttggaggtttctaaaatatactgaaacctgattcaatcccatgcttagcttggccgattaaatcagaatctctggggtggccctgggtgcccttaagggtcacaaagatgatctgatgtagactctgctctccaggaggttctgggcgtatttgccacggataatcctaatgtaaagtagaaagtgaaggacatgcagacagggagccctggaagtgcccgggtggtaagattgtctgtatttcacaaacaactggggtcaaagcaaggtgctgtgctatttatttatttttattttatttatttatttatttttgagacagagttttgctcttgttgcccaggctggagtgcaatggcgtgatctcacgctcaccggaacctccgcctccctggttcaagcaattctcctgcctcagcctcccgagtagctgggattacaggtgcctgccaccacacccagctaattttgtatttttagtagagatgaggtttctccatgttggtaaggctggtctcgaactcccaacttcaggtgatcctcccacctcgcctcccgaagtgctgggattacaagcgtgagccactgcgcctgcctgctatttatttatttatttatttttgagacggagtctccctcttattgcccaggctagagtgcagttgcagtggcatgatcttggctcactgcaacctccgtctcccatgttcaagcaattcttgtgccttagcctccccagtagctgggattacaggcttgtgccaccacgcccacctaatttttgtatttttattggagacaggtttcaccatgttggccaggatggtcttgaactcctgacctaaggtgatccacccaccttggccttccaaagtgctgggattacaggcatgagccaccacgcccggcctgctgtgctctttcttttcaagcatttctgcttgatcagggatttaagaaaatgaaagctgttgtactgatgtaaaattagaaatgaaatctctccagggtccaagatcattcatgattttgctaatatacatttatacttgtcttatcaaatatttttaaatgtttattgacaaatatgcttatttatttatttatttgagacagggtctccctctgtcgcccaggctggagtgcagtgcaggctggagagcagtggcatgatctcagctcactgcaacctccacctccgtggctcaagtgatcctcgtgcctcagtctcctgagtagctgagaccacaggcatgtgccaccatgcccagctaatttttgtattttttttgtggagatgggtttttgtcaggttgcccaggctggtcttggactcctgggctcaattgatctgcccaccttggcctccgaaactgctgggattacacgtgtgagctgcctggccccaaatatacttttttttttttttttttttttttgagacagagtctcaccctgttgcccaggctggagtgcaatggtgtgatctctgctcatttcaacttctgcctcctgagttcaagtaattctcctgtctcagcctcccaagtagctgagactacaggcgcccaccaccaggcccagctaatttttgtatttttagtggagacagggtttggtcatgttagccaggctggtcttgaactcctgacctcaggtgatccacccacctcagcctcccaaattgctgggattacaggcgtgagccaccacgccaggcctatactttcttaatatactttgtgtgtatagtgtttaattctcaccattcttttaaaatattatggagtcaggtgaggtgactcacgcctgtacttccagcactttgggaggtctaggtgggaggatcatttgcactcaggagttcaagaccagcctgggcaacataaccagaccttgtctctactaaaaattaaaaaaatgctgggcgcagtggctcatgcctgtaatcccagcactttgggaggccgaggtgggcagatcacctgaggtcgaaagttcaagaccagcctgaccaacatggagaaaccccgtctgtactaaaaatacaaaattagccaggcatggtggtgcatgcctgtaatcccagctactcggaaggctgaggcaagagaattgcttgaacctgggaggcggaggttgcagtgagccaagatcatgccactgcactccagcctgggcaacaagcgtgaaactgtctcaaaaaaaaaaaaaaaaaaaaaaaggttgggtgtcgtggcatgtacctatggtcccagctactcgggaggctgtgttgggaggattgcacctttgatgggtgacagagtgagaccctgtctccaaaaaaaaaaaaaaaaaaaaaagagttaaactgtaaaacctttaggtcttgtttattatttttttaaattttttcttttaaatagagatggggtcttgctatgttgcccaggctggtctcaaactgctgggttcaagtgatcctcccacctcagcctcccaaggtactgggattacaagtctgagccaccctgcccagccaggttttgtttattaattctatggatttttttttttgagatcaagttttgctcttgttgcccagtctggagggcaatggcatgatctcggctcaccacaacctccgcctcccaggttcaagtgattctcctgcctcagcttcccaagcagctgtgattacaggcgtgtgccaccatgcccggataattctgtatttttagtagagacggggtttctccagtctggtctcaaactcccaacctcaggtgatccaccggcctcggcctcccaaagtgctgggattacaggcgtgagccactgtgcccagcctgtggatctttttttttttttttaacaattcaaaagtatgtttctggattttgacaaactaagtgaaattgcatactgtttttactctactgaacaattccatgaagatgagaacagtttaaccttataggcctcagaagctaggattaaaaagaacataaaaataattacaagaagaaaaagattacttctacctgaaggacctagacatttctgggaagaaacagcagtgaaagtgaccttcatgtacatggagtatttagatcaggggtctccaatcttttggcttccctgagccacactgggagaagaattgtcttgggccatgcataaaatatacgaacactaacgatggctgataagctaaaaaaaaaaaatgtgaaaaaatctcataatgttttaagaaagtttatgaatttgtgtcgggctgtattccaagccgtccttggctgcatgtggtccctgggctggaggttggacaagcttgatagatgtttgggagaaaatgggaaagacaatgtaaactgaagggacctcatgaccaaagcaaagagatgaccaatgatgaccacttctactaggcacaagaaaggggttctatgtggctggtttgtagggtgcaggagaagcctggaagggtgggttaggggctgaatgttcaaataccttgaaagctgggctttgttctgtaggtgagagcgaaccatcagaagttcttttggagggcgtgttattctaaaaagcctgtttttattatgtacatatttattttttgagacggagtttcactcttgtcacccatgctggagtgcaatggggtgatcttggctcactgcaacctctgcctcctgggttcaagcaattctcctgcctcagcctcccaagttgatgggatcacaggcacccacaaccacgccccgctaattttttttttttttttttttgtatttttagtagagatggggtttcaccatgttggccaggctgctctcgaactcctgacctcaggtaatccactcgcctcagcctcccaaagtgctgggattacatgtgttagccaccatgcccggaaaaagcctgttattttacttgattcttttaaaagataggcaaaggtcagatctttggactagtgaggaaaatacaggttaaatgatttttccaagttaaccagcaagtccatgatagtgatgaaggtaatgaaaatagtaacagctaacatttatcaagtattttctatatgccaggccctgttctaagcactttatatgcataatctcacttattcctctcaacaaccataggttgtaggttttaatattatccctgtattgcatatggataaatataggacacaaaccagttaaataatttgcccaaggacacacagtgtgtaagaagcagagctagaggccaggcgtggtggctcatgcctgtaatcccagcactttgggagaccaaagcaggtggatcacctgaggtcgggagttcaagaccagcctgggcaacatggtgaaaccccatctctaccaaaaatacaaaaattagctgggcacggttgtggacgcctgtaatcccagctactcaggaggctgaggcaggagactcacttgaacctgggaggcagaggttgcagtgagccaagatcacaccactatactctagcctaggtgacgagcaaaactctatctcaaaaaaaaaaaaaaaaaaaaaaaaaagaagcagggctagaaattgaacccaggccatatagcttcagcctatgcctttatcagctgacttcctaggtatttgggatttttattttatttatttatttagttttgagacggagtctcactctgttgcccaggctggagtgtagtggcatgatttcagcttacggcaacctctacctcccaggttcaagtgattcttctgcctcagcctcccaagtagctaggactacaggtgcctgcccccacacctggctaatttttgtatttttagtagagacagggttttgccatgttggccaggctggtcttgaactcctgacctcaggtaatccacccgcctcaggctaccaaagtgttgggattacaggtgtgagccaccacgcctggccgtatttgggatttttttttttttttttgaaacggggtttccctcttattgcccaggctggagtgcaatggcacaatctcggctcaccgcaacctctgcttcccgggttcaagcaattctactgcctcggtctcccgagtagctgggattacaggcatgtgccaccacaccaggctaattttgtatttttagtagagacggggtttcaccatgttggtcaggctggtttcaaactcccgaactcaggtgatccacccgcctcgtcctcccaaagtgctgggattataggcatgaaccactgcgtctggcccatatttgggatttttaaacaggtaggtgatgggatcagacttgtagtcactttgtttggctacagtgtgaagaaggagttgaaggagagactgagaatagggagaccagacaggagggctgttgtaattgtctaaacgtacattgatgagaacctaaattggaaacagatgtgagatctgttaggtcctggtggggatagcacatagcacattatttttgacaatttgcttgtctgtcattggactataggcaatttgagagcagggactgcttgtcttgttcaccattctgtcttctaccaggataccttgaacatcttcagtgctcaatagttgctgaatgaataaatgagtctgagtaactccaagggtttgcttttagtgtctggcgggcttggtgatcattcatcaaagacagggaagatgggcattggagcagggtggggaatgttgcagagatgctgttgacttggggtatgctaagttaggtgtaactatagcaaacacgtgtagacttactgtgttccagacagtgttgtaagcacccttcatgggtaggtgtctctgttatctaaaattgggaactgaatagacttgagtagcaagaggtattaatgatttaaccatcacaacaacctcatgaagtaggtactattattatcatcaacttttaattttagagattaggaagctgagccatggaaaaaggaagtggcccaaggccatataaataagctgcagaggggatttgaacccggtcagccaggctccaggcacttagccactgcactgtactgcttcagtagagcatagaggtctgtgctcaggtctaggctagagctggaaccttctagagtcagtaaatattctgtacagcaccacaagactgacagtcatggctcaatcattgtcttcgcctgtaatcaagaaaggcctggttcctcaagggtggtgcttggagatagagtggttcaggttgtgtcagaagtggcctcggattctgcagtcccccgagctagagtgtgctatgtgttcagagtaggcttcaaaggccataccccctcattgcccctactcaccacccctagacctctctgctcaccctcagccacactaggtgccacccagtcgcagagcaaaaggagtttgcagggagggctaggaaatggtgagtatcagaaaaggtgtcctctgaggggtgggtaaactgcagtttagccctccccaataactgcatttctctatttttttctccttctttctctccctcatgcccctcccaacccctcatctccctgtcttcctcagtggtactgactgtcctcacccacacccctgcccctcgagtgagactgggacaagatgctctgctggacttgagctttgcctacatgccccccacctccgaggccgcctcatctctggctccgggtccccctccctttgggctagagtggcgacgccagcacctgggtaagggacatctgctcctggctgcaactcctgggctgaatggccagatgccagcagcccaagaaggggccgtggcatttgctgcttgggatgatgatgagccatggggcccatggaccggaaatgggaccttctggctgcctacagttcaaccctttcaggagggcacctatctggccaccatacacctgccatacctgcaaggacaggtcaccctggagcttgctgtgtacagtgagttgggggacagaggtctccaggggtagagggtgggcactggattgtggggaccgtaatagggggagggatgatggataagagggtgcctgggcaagtaagtagagatagaaagaggttcctgggagttagaggggtaatgggaggctagaagtttcctggaaatttgaggggctttgacatgggtatttctgtgacgcaccaatggagagacagtgggttccctatttcaggagaagaaacctaaccttctttagttctgaggaagccagcaggcaaactgagggtctcttagggaggacagtatggactgatttccctatgctcatttcgtcctctttccccagaaccccccaaagtgtccctgatgccagcaacccttgcacgggccgccccaggggaggcacccccggaattgctctgccttgtgtcccacttctacccttctgggggcctggaggtggagtgggaactccggggtggcccagggggccgctctcagaaggccgaggggcagaggtggctctcggccctgcgccaccattccgatggctctgtcagcctctctgggcacttgcagccgcccccagtcaccactgagcagcatggggcacgctatgcctgtcgaattcaccatcccagcctgcctgcctcggggcgcagcgctgaggtcaccctggaggtagcaggtaagagctgggagctctgcggaatctgagccagcacccaggaagacaggagctcactctcaccccttctgcctgccaggtctttcagggccctcccttgaggacagcgtaggccttttcctgtctgcctttcttctgcttgggctcttcaaggcactgggctgggctggtaagtgtcagccctaccctgaccatgacctgaggttggtggactttccccacctactcccaagagcctgacacccatccctctgccctccacctctaccactccagcatcccatcccttctcaatctttccccacagctgtctacctgtccacctgcaaggattcaaagaaggtacagtgctccacctctctgtatctttcccttgtcactttatctcctcatcctatctcaaaacccatggagggaggctgctggtgtggtaggcagaacctaggcttggaattcacactgatctgggttaaaacctggcactatatcctaactgtaggactctttgagcatgctacttaatctatatgtttccttgggtgtagggattttaaaaagttacttaggcagtgctgtccaatagaaagataatgcaagccacatatgtaaatttaaatactctagtactcacattaaaaaaataagcagaaacaggtaaaattaacttaataatataccttatttaatctaataattctggtcccttatctgaaatgcttgggtcagaagtgtttttggatgttggattttttcagactttggaatatttgcatatatttaatatctttgggatcagacccaaatctaaacacagaaatcatttatgtttcctatacaccttatacacatggcctgaagatttttttccttctctttttttttgagacagagtctctgtcgcccaggctggggtgcaatggtgcgatctcggctcactgcaacctccacctcccaggttcaagcgattctcctgccttagcctcccgagtagttgggattacaggcacccaccaccacgcctggctaatttttgtatttttagtagagacggggtttcaccatgttggtcaggctggtctcgaactcccgacctcaggtgatccgcccgctgccttggcctcccaaagcgttgggattacaggtgtgaaccgctgcacccgaccacaatatttttaataatatatgtgacccatcacatgagggcagctgtgggattttccacttgtggcatcatgttggcactaaaaaaatttcaggttttggaacatttcagattttagagttttggatcggcgatgctcaacctgtacatccaaaatattattgcaacatgtaaacaatataagaaattacaggccgggtgcgatggctcatgcctgtaatccctgcactttgggaggccgaggcgggaggatcacctgaggtcaggagttcaagaccagcttagccaacatgatgaaaccccatctctactaaaaatacaaaaaattagccagatgtgacggcacctgtaatcccagctactcgggagactggggcaggagaatcgcttgaacctgggaggcagaggttgcagtgagctgagatcacaccattgcactccagcctgggtgacaaaaggaaaacttcgtctcaacaacaaaaaaaaaagaaaaagaaattacagtcttggccaggtgcgttggttcacgcctgtaatcctagcactttgggaggctgaggagggcggatcacctgaggtcaggagttcaagaccagcctggccaacatggtgaaaccccgtctctactaaaaatacagaaaaattagccgggcatggtggtgcacacctgtaatctcagctactcaggaggctgaggcaggagaattgcttgaacctgggaggtggaggttgcagtgagccgagatcgcaccactgcactccagcctgggcaacagagtgaggctctgtctcaaaaaacaaaacaaaacaaaacaaaacaaattagctgggcatggtggcacacagctatagtcccagctacttggggagctgtggcagaaggatcgcttgaatctgggagggtgaggctgcaatgagctaaggttgtcccactgtactccagcctgggtgacaaagtgagaccctgtctcaaaaaaaaaaaaaaaaaaagaaagaaaagaaaataaattgcagcccttttctcaccttaagtattcaaacacaggtgtttattttaaatagtcagcacatctcaattcggactagccacatatcaaatgctcaatagcctaatgtgggtggtggctgtcatattggacagcggagcctgagaggacttttaggaggattaaggaagacagtgtatctccttaagaagatgcaggagatacagcactcagcagtgtctggagggcagaaaatattagcctcatccttctcccatcatctgtgcccatgatagtttatatgtctctaaactgaccatgtacacctcaactgccttttaatatcctgaattcctcaccaccttcctctcttccagaaagcagagtgagggcactcactgccatcctgtggaagccaccatcatctctggcccaagcttctgtagtagctccctaaaataataccctatcatctgctcctaatccctccaatctctctccactgagtggctggaatgcttttttttttttctttcacttatataagggataatttttcttttttttttttttttgagacggagtctcactcttccgcccaggctgcagtgcagtggcatgatcttggcttactgcaacctccgcctcctgggttcaagcaattctgtggcttcagcctccggagtagctgggattacaggcacatgccaccacacccagtgaatttttgtatttttagtagagacggggtttcaccatgttggccaggctggtcttgaattcctgacctcaggtgatctgcccacctcagcctcccaaagtgctgggattacaggcgtgagccaccacaccaggcccgagaaatgcttttttaaaaaacacacatcttatggcattcaccttcttggagctctaggacagtggttctcaaaatttttttctctcaggacctcttaaaaatcatcaaggaccccaaaaagcttttgggtatgtgggttatagctatcaatatttatggtactagaacttaaaagtgagaaaaatttaaaacacgagaatacataggcacacattctattcatcgtgggaaccatggtgtcaatacatatcatgtagcttctgaaaaactccactgtacacttatagaatgaagaaggcaaaaaacttttttttttttttttttgagacggagtctcgctctgtcgcccaggctggagtgcagtggcgcgatctcggctcactgcaagctccgcctctcgggttcacgccattctcctgcctcagcctcccaagtagctcggactacaggcgtcctccaccatgcctggctaatattttgtattttttagtagagacggggtttcaccgtgttagccaggatggtctcgatctcctaacctggtgatccgcccgcctcggcctcccaaagtattgggattacccgcgtgagccaccgcgcccggctgcaaataatctttctttttttctgagacagagtctcgctctgttgcccaggctggagtgcagtggcacgatctcggctcacggcacgctccgcctcccgggttcacgccattctcctgcctcagcttcccgagtagctgggactacaggggcccgccaccacgcccggctaactttttgtgtttttagtagagacggggtttcaccgtgttagccaggatggtctcgatctcctgaccttgtgatctgcccgcctcggcctcccaaagtgctgggattacaggcgtgagccaccgcgcccggcggcgaaacacgatattgtactaacatcttaattttgttataaaatctcacaaaccccctgacatagtctcagagatctgtagggccgaggttacatttggagaacccgtactctagggccaaatccattcttcttgccctggctcacttgtcccccccaccgccccgcgctggagccactgcctagttcttcagccctagatggtgctcgccagacctcctctcaatgctcatcacacacagggctattcctttcctccaatgaaccaaacgcctcccgcccacctccaggtcccagtcctctgttccctttgcctggtccacccttgccctccctgggtcgcagacgaggtcggcctcgtcattccccgcagaccgccgcgcgtccctcttgtgcggttcaccacagttgtatttaagtgatcgtgtgagtcgtcgttaaatgcctgtctccccgcggatcatgggctcctcgaggacagggactggcctgtctgtccactgctgtaaccccgcgccggcatagggacctaaggcccactggagggcgctcatcaagtagctgctggatgttgacgaaggaagcggcggcgcagctcagggatctccgagtcaggacggtcggccagacccacggggtaacgggtctaatcgtgtaggaataaagctgtattccagtgcttccaaa

SEQ ID NO: 17 - DNA, 59597 bp, Homo sapiens
atgccggtcttagcccctctgtagggaaagagggtccgccatgttccccggcggcgccgccgcttggctctggtagccgccgcccccgcccccaaccccgcccggcccagagcctagccgagccccgggcccagcatggccgccccggagccggcccgggctgcaccgcccccacccccgcccccgccgccccctcccggggctgaccgcgtcgtcaaaggtgagaggtggacgaaaccctgggggcctggcctgaagagctagctgtgtgtgagggcgggcgggagaccgtcccctcgggagtgggcccggaagggcgggcgagtgactggctgcctcccttggggagtggcccctgggcgggcccctgctgggcagggctgagtcggtggcagtggttccgcggtctcccggttgctttcaggccggggcggaggttttgcttccgtggcttcctagcccaaggggtgaggctgttagctgcagtgagcccgttttctcttcactcggcctgtcaaagcggcgcaggggccgcgattagcttcctgccccgcgacagctgcacttctggcttgccggggcgaaccgaggggctcggagaccttcagccacgcgaggcccgccagtgagcagtcagaaatcacctcggctttggcccacgcctgctccccggtgacagtcgtccgccctatccgcgtctagctggcgacaaccgcaggggttcacttttggccgtcaggtgccacccggagcagaaattaggggaaccttgtgggattggatcacggtgaagggtcggggcaggaattggaaggccagcctttatagtgcagaaagggagaaaaagcagcataaacgaaaaaaaaaattcttgtggatagcaagtatttacttagaaaaccatcaacactttggtcaaaaggagttacccctcccttacaaacacacacccacacattcatcctagacgaaaaagttaaatgtttctcagccagggcagaatttatggatgtttacccacaacaggtcagcagattaatttaaaatagagaaattgagggctaattgagagttgcttaagattccaagcttcctgggagagcctaccaacctcaaacactgctgtggaggtgaaaaacaattgaaatgattctctttaccatgtagcttgattgataaattgaaatcgtagaatgaacttttccttatttgtattgtatttatttttaaaatataggtacttttgttttcattcagcttctcaaatacactggcacagtatttaaacaccgttagcctactttttgaaatctgactcatatgtttccattaaaatatttaaaaacaaggaaaccttttttcttttttttttttaattaaaaattttcaacctgagccttcttcggttcttaaaagaataatactaatttggcctggcgtggtggctcacatctgtaatcccagcactttcggatgctgaggcaggcggatcgcttgaactcaggagttggagaccagcctgggcaacatggcgaaaccttttctctaccaaaaatacaaaaaataaaaattagccgggcatggtggcgcgcccctgtagtcccagcggatcgggaggctgaggcacgagaatcactggagcccgagaggcagaagttgcagtgagccgagatttgcgccagtgtgctccaacctggacgacagagccagaccctgtctccaaaaacaaaaacaaaaacaaaaacaaaacactgatttgcacctaggcttaagttagtagtatatccagttgggccaggcattggaatgagctgaataacgagtttatggaatccttaatacagagaaatcttaaaaaaaaaatagtaatgcagacattcattctatcaagaaatcctggagttttgtgggggtgggaacgggacattggctacctcttcattttctgactgtatttctgtgttgtgtgttcatttccctgggcacttttcaccagactgttagatggggtaaccaatcacattcctgaacaatgagtttatgctatccttacgtttgtgaatcttcttattccttgtcatatatatggtaatgttttttctgtactgctttaatgcagtgaaaataagattccaaacataaggcagattccttaggggtgagttgtgagtccaaggcagtcatatttgcaggttattggtgtggaataaaagccatttgatttagataaataggaaaggagcttgttaatatagaaaattatagttaaataaagcttatggttatcatatttctggtgcttcattgtgccctcttcatagagacaactttcatttctttatggaatttgttaaccagttggaattcctgtatggattatatgttttaaaatggtgtgtaacagactaatttgcactgctcatggagtctcctgcatttactgggaaattcacctttcttacagatccagaaattcacttttaaatttcatcttcaggattcttccttgtcttttattcagtaattatactataatgtgatacctgatattagagaatactggttgcctgatgataaatgatgtgagttcagcttaagtttaacttgttaaaatccaaatttcttttaagtccacaatgtggtggtagttttgtatcgatacattttcatagtagtgatattatggagactgtctgttggcattgaatgcaagtagtctttttctccctggaattttttttttttttttgagacggagtttcactcttgttgcccaagtggagtgcagtggcgcgatctctactcactgcaacctctgcctcctgggttcaagcgattctcctgcctcagcctcccgagtagctgggattataggtgcgcgccaccatgcccggttaattttttgtattttttagcagagacggggtttcaccatgttggccaggctggtctcaaactcctgacctcatgatcctcccaccgtggcctcccaaagtgttgggattacaggcgtgagccaccgcgcccggcctgcctccctggaacttcttagtgtcaaaattttatactccatgcttgtagtcataaggcctacattttatggtcatgtaggtttttaagggtgtataggtctttctgtgtttaagatcagatacctgaaattcactttttgtgaagtttgggagcttggaatactgtaggtgattcatgagtaaatgtgatgagcttgtcactaaaattattagtggtaattccatgtcattgattatgggtcattaggtttttggttgattaaattcagttctgagcctactccagctgctggctcaagtcaaattcttcccctgtttgaaagttgatctaacccacctgattaagcaagatggtatatacccttttaattatattctattaagcattctttagctatgtaggaaataagaaagtggaaaaaaattaggaaaaatatctaaccgtatctgcatgtgtgctttcttaccacatcagcaaagctggtataggtaattgaagcacaaaatcctgaatttatatatattgctttccctcctccccacaaagtttacttgacctgaattgcccagatacctccttttttccccagatacttaaaaaatgtacgttttgctttgtataccaggttctagatttgtaaagctggattgtctcttgagattatcaagactgttagtattaataaaaaattcacctttttacttagagagcattgtcagtattgggcatatgttcattttagcacctacaatgtgagtcattttcttaacattattttatttcatgggttatagtaacctcaaattatcagactttcagattgaaccaaaatgctgaatttatgtgttttaattttttttaagctaaagtatttctgattgacaacgttagaattcatttggattctgttgccagttgccctgcttataaatctgaagtcatttggctaaagtgttttctagtagctttcctttaggaggattactttttgtttatttatttatttatttatttatttatttttgagatggagtttcgctcttcttgcctagactggagtgcaatggcgcaatctcggctcactgcaacctccacctcccgggttcaaacgattctcctgcctcaacctcccaagtagctgggattacaggcatgtgccaccacgcccggctaattttgtatttttagtagagacgacatttctccatgttggtcaggctggtctcgatctcctgacctcaggtgatccacccaccctggcctcccaaaatgctgggattataggcatgagccaccgtgcctagccagattacttattttcagataacccatatagccttggtgtgacatagctacttcagtgtttcttgctagttctatttcattatattttaaagcagcttgaattttaatttttgtttacaaagtctattttgtggacttatctgtgtaaaaagaactagaaattatttttcttttactttccactctcattactgttaaccatactaaaataaatcttcaggccaggcgcagcagtggttcatgcctgtaatcccagcactttgggaggccgaggcggggggatcacttgaggtcaggagtttgagactagcctggccaacatggtgaaaccccatctctactaaaaatacaaaaatttggctgggcacagtggctcacgcctgtaatcccagcactttgggaggctgaggcaggtggatcacgagatcaggagttcgagaccagcctgaccaacatggtgaaaccccgtctctactaaaaatacaaaaattagcctggtgtggtggtacacgcctgtaatcccagctactcgggaggctgaggcaggagaatcgcttgaacctgcgaggcggagattgcagtgagccgagttcatgccactgcactccagcctgggcgacagagcaagactgtcaaaaaaaaaaaaaaaaaaaaaaaaaaaaaacaataaaaacaaacaaacaaaaattagcagggtgtggtggcacgcacctgtaatcctaactacttgggaggctgaggcaggagaatcacttgaacctgagaagtggaggctgcagtgagccgagattgtgccactgcaccctgcctgggtgacagagcgatattccgtctcaaataaataaaaataaataaataaaataaatcttcagtaccatgtgtcctagtgaaagcaaaggaacagaaagagagagagaaaaagagtgtgaggggatggggtgagagggagagggagagggaacactatggtaacaagttaccttaaaaggaaaatgccaagttggaaatacagcttagtagtgaggcaaaagcttcaggttccagagctattgaatgaattggcaagagttgtaaggaaaagtttggtaaaaggaccttgatttattaaacaaagcgtgccaatcatatgacctcatttcaccataaaaaatgttttttatacacagagatgaaataagctgaagctaattgggcatcgtctgtgtatggtatgtaaaatttattttggaacatcacagtcgtgaaatagcaaatatttattaaatgtctgctgtatcacaaaactgtaggagaacaacaaaagtacaaaatataaaatacagacttggttcatgaataaatattcatgaaaaattaacaatatatgacataaggacaggtatagttaataattgccaggtaagttgctgagcccgcaagttgtcagttcaaaggaggtagtgatgactctggactggaatggtctaggaagggcttgtgtagaagcaaaggggccttgaaggatggttaggattaaaatagaggattgggaccatttatttgtgcagtgtttattgagtaccagctttgtaccaggcattgtgctaggcattgatgatacagaagtgaataggatattaagtaagatagattctcttgtagtgccggcattctagtgggggagacactattataaataaataatgtaatgaatttggtacaaagcgctactggagctgtaaagaagggattggctatcttactttgagggaaagcgtcactgagaggataatgtttcgaggtagtccttgaaggatgagtagaatttcaccagaaagtggggctagagtaggtgtaacagaagcagaaaggcatggagtttgaaaaaagcatgaaatgtatggcaaaagtatgtgaagtgcttggcaaggagtgacaggaatgaagttagaaaagatcttttgtattacaagttgaggagctaaaacttaagctgttaagcagtatagcagtatatagtacctggatgattaaaagcacaagctctggagtcagactgcctgggtttgaatcctagctctactacttaataaccttcttgccatggacaagatacttaacatctccaagccttaattttcttatctgtaaagtagagctaataaaatcttattatagggtttttggagaattaatagagaccgtgcatataaagtaggtaccacagttcctggcctggcacatggtaagtactcaaccaatggtaaccatcaccattattattattattattattattgaaggttttaaagtagaatagtgacccagtatcttgttttttgatggctaattctggccatattgtgtgcaacaaattattggagggcaagaagcttaaagcaggttgtctaattagaagattaatggagtagtccaagtgagggatgaccaaggcatgaaaaactagatacgacacaaattcctactaatattagaaggtaagtatattggatgagtgattgagtatggaagtgaaataggtgagcaacagttttttaggaaacaataatcagaataattttgctttagggctagattaaattgggcaattgtagttagatgcaaagattggaatgatatgtaaaagactgagaatggttaaattgagaagaaccttgaaaataagatccaaagttttctttttctttattctttagtcattaagaaactaccccaagtttttgagtaggttaatttactactttgttcagtcaaagaggaagaagagatttttctagtaaatgataagaacttgaactagtattgcaacagtggagatttaagaaaattgaatttgaagaatcaataggacttagagttcagaaagagaacaatgacattaagtgtgagtgatagagaatggtgataccttaacaggtgtaagccaggaaggggagccaattttgagggaaaggtatatttaaaaaccaccacaaattaaaagagacccaatggataccttgaaattttgaagacaatgctgttggatttattgaatctttccttaaagcatgtggccaatccatacttctactcctggcaagcaaatggttatatcattcttcatgatgaggcttttttttttttttttttttaaccctcaagacaggatcttgctctgtcacccaggctgtagtgcagcgccatgatcatagctcactgcaggttcaaacttctgggctcaagcgatcccccaactcagcctcccaagtagctgggactacaggcacacaccaccatgcctggctaattttgtttattttttatggagacagaggtctcactatgttgcccagattggtctcaaattcctgggctccagtgactgtcctgccttggcctcccaaagtgctgcagttacaggtgtgagccaccacgcccagccatgatcagccttttgatgtctccttttgtcaaaagaaaattgtccttgtgttggtataaagacatatgctacaggagcagcattctgaagacttcaatttcaactatggctctacttcttactagtgaaacccctggagaagcaacttaatgtctctgaacctgttatctatcatttgtgaaatgggagataaaacttgcctgaccctaaccccagcactttgggaggtggaggcgggcggatcacttgaggtcatatgttcgagaccagcctggccaacatggtgaaaccccgtctctattaaaaatatactaattagccgggtgtgatggtgggcgcctgtaatcccagctactcgagaggctgaggtagggagaatcgcttgaacctgggaggcaggggttgccatgagctgagatctcaccattgcactccaactggggcaacagagcgagactctgtggaaaaaaaaaaaacaaaaacttgcctgaccaaactcaaaggatgtccctgggaatcatgtaggattatgtatgtgaaagtacttggtcaactatgaataaaacactataaatatattgtcattgctacataaattagtgtcgttaaacaagtattttggaaactataatcattaattctgtaaacatttcttaatacctatgtttttcctgtttgttttttttttttttttttttggttttggtttttttttgagatggagtctcactctgttgccctggctggagtacagtggcatgatctcggctcactgcaacctctgcctcccaggttcaagcaactctcctgcctcagcctcccaagtagctgggattataggcatctgccaccacgccccgctaatttttgtatttttagtagagacgggatttcgccatgttggccaggctgttctcaaactcctgacctcaagcgatatacccaccttgacctcccaaagtactgggattacaggcatgagccactgcacctggccagttcttaagttttagataggttttgataatggtggaacttagaatggataagacttgtgggccagaaacttgagcctatgatgactagttttcttttgagagaaagtctcactctcgcccaggcgggagtacagtggcccaatcccggcttactacaacctctgcttccaaggttcaagcaattctcgtgcctcagcctccccagtagttaggattataggagcccgacaccatgcccagctaatttttgtatttttagtacagatgggtttcaccatgttggccaggctggtctgaaactcctgacctcaggtaatccacccgccttggcctcccaaaatgctaggattacagatttaagccacggcacccagcctatgattagtttaatagatagcagggacaagggtaaactagccagaaggcatgaatctcaaaggaggaggcattttttttcccttagtggagagatgatgttggaagtgctaatgcggagctaagagaatgctgaagcctccactgagattagtggaatgcggaaaaatgagcaccatccactttgaaaaaagaatttgataagtgttgtccttcaggagacccaagatgtaattaaactagagagatgaagacagtattctgtgtagagctaaagaagagagaggccaagcgcggtggctcacgcctgtaatcccagcactttgggaggctgaggtgggtggatcacctgaggtcaggagttcaagaccagcctgaccaacatggagaaacccagtctctactaaaaatacaaaattagccaggcgtggtggtgcatgcctgtaatcccagctacttgggaggctgaggcaggagaatcacttgaacctgggaggcagacgttgcggtgagctgagattgcaccatcgcacgccagcctgggcaacaagagcaaaactccgtctcagaagaaaaaaaaaaaaaaaaaaaaaaccagtctggccaacatagtgaaaccccatctctactaaaactacaaaaaattggctgggcgtggtggctcacgcctgtaatcccagcactttggaaggccgaggcaggcggatcacgaggttaagggttcgagtccagcctggccaacatggtgaaaccccgtctctactaaaaatacaaagattagccgggcatggtggtgcacgcctgtaatcccagctgctcaggaggctgaggcaggagaatcgcttgaacctgggaggcagaggttgcagtgagctcatgttgcgccactgcattctagcctgggcaacagagcaagactgcatctgaaaaaaaaaaatacacacacacacacacacacacacacacacacacacacacacaattagccaggtgtggtggtgtgtgcctgtagtctcagctacttgggaggctgaggcaggagaattgcttgaacctgggaggtgggggtttcagtgagctgagatcctgccactgcattccagccccggcgacgatgcgagactctgccaagaaaacaacaaaaaaagagattgtgtgtagggtttgtgggatagattaaaacaaaatcttataataggaattctgaaggcctcaatgaaaaggatggagggagaacagcaagaaggaaattgtatgagggaaagaaatacagagaaaaatttagaagtatagatgtagagactgtattttggatagttgccaaggatggcaatgatgggaagcatgatgagattaactgaccttaggcatctgaatgatactttggagtcaagttattcacttggcacagactgtacccccgttgaagtcagaggcctcatagggctaagagggcagtccttgcttagaattggggaacaggatcagttaattctcaggtttccttgcccagtggtagaaacagtaagaagatctctgtaccaccaccccctttttcccaattcctgatcagtctgtgttcttggtttctttttccaacttcctaaattaaaatgtttttcagtccttgtttttttagccaccatacattaaatgtgagtgaaaataccttgcgaatattattggttactatatagagatgcccttcatgtcaaaatttggataaaaggaagattttcaacagaacagtttggtcaaaatgaatgttaccaaatcaagatttttaggttttgaggagattttgtagctctcttttttgtttgattggtttatttttttgagatggagttttgttgtcacccaggctggagtgcagtggtgtgatctcggctcactgcaacctctgccccccaggttcaagcaattctcctgcctcagcctcctgagtagctgggattacaggtgtgcaccaccatgcccgggctaattttggggtttttagtagagacaaggtttcaccatgttggccaggctggtcttgacctcctgacctcaggtgatccacctgcctcgacctcccaaagtgttgggattacaggcgtgagccaccacgcccagccgattttgtagctctttaggttgttccaacaaatattattagccatttcagttgttgactatttatattgcatttatatacatttgttttctggtttttccctgtcgcaaatatagaaaagtaaggaaacatagtctgaaaattaggagaaaaaagtatatatggaggcaaaaaaaaaaactctggaaaagtagaaataggccttgcgcagtggctccacgcctgtaatcccagcactttgggaggccgaggcgggcagaacacgaggtcaggagatcgagaccatcctggcgaacactgtgaaaccccatctctactaaaaatacaaaaacattagctgggcgtggtggcaggtgcctgtagtcccagctactcgggaggctgaggcaggagaatggcatgaaccccggggggcggagcttgcagtgagcagagattgcgccactgcactccagcctgggcaacagagcgagactccgtctcaaaaaaaaaaagtagaaatagttggctgaagatgaattagaaataaaaaaagcaaaacctttaaaaagcctgaaaactatatggaaatgctttaaaatgctttaggagttgcaaaacaaagtagtagttgagaattaatttttttttttgagatagagtctctattgcccaggctagagttcagtggcacgatctcagctcactacaacctccaccccaccaggttcaagcgattcttgtgcctcagcctccaaagtagctgggactacaggcgcgacaccacacctggctaatttttgtgtttttagtagcgatggggtttcactatgttggccaggatggtcttgaactcctgaccacaagtgatctgcctgccttggcctcccaaagtgctgggactgcagacatgaaccaccgcacctggccagagaattagtttttgatgaaaaaaaaattttaactctctattgagcaacttattttaggccaaattctatttggacagttatcttttgccccgtcaggtctcctgctgaagctccgttctccacttgcaaaacaacactatacgtgccttttttctcttatttgctgataaattaaaatttattttatttttattttttatctttagacggagtcttgctctgtctcccaggctggaatgcactggcatgatctcggcccactgcaaccttcacctcttcggttcaagcgattctcctgcctcagcctcctgagtagctgggacaacaggcatgcggccaccatgcctggctaattttttgtgtttttagtagagacggggtttcaccatgttggccgggctggtcttgaattcctgacctcaagtgatccacctgcctcagcctcccaaagtgttgggattataggggtgagcctctgcgcccagccaaaacatattcatttgaaactgcctatttttattttcagtgttatggtaacattgattccctatagctttcatctacctctactcatgagtaggtgacgtttttctaccactcaacctgtacacattttaaaaaagctgtcccagctggttttgaaatgtagaagtgtgccttgagttgaaaaataagtaggaaagtacaggtctttagataactaactgtggcatggagtcagtttatactttctttttcaggtgaatacattatagttcttcagtgtgacttgaagtagagcattcacagtgtgcgtgaaaacatgcagtaccacttgtgtctggctgagggggaagtagggagtggtctcataggtggatttttaggaagttctatgttttgaacagaattcagcaattagtggaattatgttgttggttgttaggaagtatatatcatctaggccaggcacagtggctgacgcttgtaatcccaacacttagggaggccaaggcaggcggatcacctgaggttaggagtttgagaccagcctggccaacatggtgaaaccctatctctactaaaaatacaaagattagccgggtgtggtggcgggtgcctgtaatccgagctacttgggaggctgaggcaggaggatcgcttgaacccaggaggtggatgttgtagtgagccgagatctcgccactgcattccagcctgggagacaagaatgagactctgtctcaaaataaataaataaataggaaatattcatcatgtagaacacagctttttttttagagactgagtctcttttttttttttttttttttttttgagacggagtctcgctctgtcgcccaggctggagtgcagtggcgcgatctcggctcactgcaagctccgccttccgggttcacgccattctcctgcctcagcctcccgagtagctaggactacaggtgtgcaccaccacacccagctaatttttgtatttttagtagagacggggtttcaccgtgttgaccagggtggtcttaaaatcttgacctcatgatctgcccgtcttggccttccaaagtgctgggattacaggcgtgagccactgcatccagccagtacgtagcattttaaatagtgtttcttttcccaagtagagtgctaaaaaaaaaaaaaattctctgacctgatgaaaaaactgattctatcttgatctcagaaatttgtgtttattagtaagagatatttaaccttctcatttttgtaatgtcccaaaagtaacacttgatttatttagtaatcaattcattaaaaatgtttattttttaaacaattactctaccatgagggcaaatttggttatagcatatataatggtttgtttaatctttgattggtaaaaacattctttgaggcttttattttattagaatcttgacatgctatatttgggggtaaaatatactttaatgccttattctagatgagtaaaaagtaatggtaatacatgtttcttgtgaagggaaaataaacaaggtccagttttattttactagatagcaaataaaaaaaaaaagagggattagtgatttcagtcttttagaaatggttggcatctctctgccttagttcttacctcacttgtaaaggattgagttcttccttaatgttttctcctggtatgagaatgtggttatattctttcttaggtaattgataggaatctaacctagtttttttttttgtttttttttagttactttaagttgaaatgtaaaggagcagttggttctgtacatttccaagcttctctgtaataattgatcattacaatgatgaccctaaagcatcaggaaaatactgtatactatatgctcagagatatatatatgtatatatatatatatatttgatggagtctcactgtcgaccaggctggagtgcagtggtgtagtctaggctcactgcaacttctgcctccccgggtttaagtgattctcctgcgtcaccctcttgagtagctgggactacaggtgtgcaccaccacacccagctaatttttgtgtttttagtagagatggggtttcaccatgttggccaggctggtcttgaactcctgacttcaagtgatccactggccttggcctcccaagtctgggatttcaggtgtgagtcactgcacccggcctatttttctaaaaaaaaaaaaaaaaagaaaaaaaaatctggaaagagggagctgccttacatttcagtctatatttattagactcctaatgtacatttctctctcactttctttattttgaaaaacaaagtactattcagtaaagagcctgaaactgcttcagtccaagctgattttgaatgcataaagatttacttgttggattcagtaaaaaaggaataagaaaaacttactatatagtaatttttcctaggtatatgacctcaaaattgtgcttagatgccattgaaatagatgttcatgttttccattccactcaacaaatatcacttaaaaacagtacagttggtgatttcttacagaaatcataaatatgtactgcggagtgaaaaaaccaactacttaactatgatgaaatgggaacttttggttaaatttgtagggataggccaggtgcagtggctcatgcgtgtaatcccagaactttgggaagccaaggcgggcagatcacctgaggtcaggagttcgacaccagcctggccaacatggtgaaacccggtctctactaaaaatacaaaaataagctgggcatgatggcggatgcctgtaatcccagctactcgggaggctgaggcaggagaatcccttgaacccgggaggcgaaggttgcagtgagccgagttcacgccactgcattccagcctgggcgacagaacaagactccatctcaaaaaaaaaaaaaaaaaaaaaattacagggataaatttgcagtggtaacattttacacatatgcaaaaagtgctgtatctcaaacagtttaggtggaaatgagtatgatttgctttcagaatgtgtgttaggtgactcagaaagtgacttcaatgataaggaatgcactggtttcgaatatatgcataaagattttgaatgaaggtgttttgtgaaacgttaagtaaggtaggagaaaaatcagtattttgaaattatgatttattattttaagcctcctaaattaatttgcatttcagaagtaaacatctggtgtttggtctatatctctaaaagtgtatagtcaagttggtcagaaaacattgtttttatgttcttattagaaaggaacatggtaaatcaccttgtatttgggttttctttctagttaggcttatttggtattaaagtgttgtggggttttttttgagatggtgtctcgctgtgttgcccaggctggtctccaatttctggcctcaagtgatcctcctgccccagcctacgaagtagtcgtgattacagacatgcttcactactcccagcattaaattatatttattgtacttcatttaaggtaaagaatatctaatactataatacaatattttgagagttctgcctaaaaatgttttggcttaaacaaaaaagttttggttatcctgaaagaacttaattttgtgagacaactcatttctctaataattctcaacaaagaacatgttagtataaatagctttaaaagtggtataatttgcttactatttagaaaaacacttctacccaataaatgaagaagaaagaaaaatccctgctttacagtttttagtcttatctagatccaattattagtttttaagttaatgtatttttggtgacttatcttttattaattaaaaacatttgcagctgtccctttccccccaacacatcgcttgacatctgaagaagtatttgatttggatgggatacccagggttgatgttctgaagaaccacttggtgaaagaaggtcgagtagatgaagaaattgcgcttagaattatcaatgagggtgctgccatccttcggagagagaaaaccatgatagaagtagaagctccaatcacaggtaagcttattcatgttttgggtattatttttattatgtcattatttagttgcctggatttacaacttactgttttcaatgatactgtatgctaaatcaatattacttggacattatcttgaatttcaaattattttccatacttaaaaatgattgcctgttttcagtgaatagacatgattctaaataatctgagtgtagaagttagtctaatatgcttttgtgaaggtttcatcaattgtgttgaccatacttcaatttgatcaatacttactttgctttcaattgttagggtcaaataccttgatgtcatatcagataccaaaagtgaccatttagagagcaacagaaagtattgagttagaatggatattttaactgccaccattgtaattttgtcatcttgaaacttaaaacacatccttggagtcctagagacgatctttataaatgtagatttcagtttgtcactgaccacaaatttcgttatttctgttacatctttttctagatcttgagcacatgaacacttggttacacatcatcctaatcatgactgttcatagactacttccttctcagacatttcttgatagcatttgtactatgtcttatgtaaaatacgttttaacttaagtaaaatttgttgttttagagatttttttcccttatctaataatcttcttgtttcagtgtgtggtgacatccatggccaattttttgatctgatgaaactttttgaagtaggaggatcacctgctaatacacgatacctttttcttggcgattatgtggacagaggttattttagtatagaggtaataatcataaactgtcatttgatttgctgttaagtgttaacacagatgctttcacttaatcctagttttcacaagtacctgtgttaggtttttttaataactctgcatattctgaagtttttatgaaaagctactatttattcctgttctgtctttcaaacaattcaaataaatttctttgtataactctgtttatataattataattgccatttttttcccagtggaatttatgagctgactgaggggtctttattgccctgttaactagtggccttaaaaatttagtgctatttatctctcttgcccctaaaggcattaaaccatgtgaaaaaagattacttgaattctgtctgattaaataaagtatattgtgatttttttattgcttgagccctagtgcttctgtttctccttgtgtagctattaagactcaagtatatcctatggaatctttgtgtatttggaaagtattaatttgtttttaaaaacttgaggcattaaaatgaccttttgattatcacttaacagtagatggttccttttcttcctttttctcttttctttttctttttttttgagacagggtcttactctgtggcccatgctggagtacagtggcaccagcatggctcaatgtagccttgacctcttgagcttaagggatccttctgtcccagtctctcaaatagctgggaccacaggtacacaccaccatgcctagactaatttttaatttttttgtagcaatggagtttcctatgttgcccaggctggtcttgaactcctgggctcaagtgatcctcctgccttggactcccaaagtgttgagattacagatgtgagccacattgccctgccatctttttaaattatataaacaaaatgcagcaaatgtagaacaatatgtattttccaatatatacattttttctttttttaatgaaaaggggatcatattataatattgtctgtaacttgctttttcatacatgcctacaccaaatatccttccaagtcagtaaatataaactcgtagcatcattttaatatctacattgttttccatctaataaacaaaccataattaattaattccttgtgttagacactgaagatgttcccagtttttttctttacaaatgatgctttaatgagtcatattattcatacatctttacatacttgcctgattatttttgtaggacaaattcctagaggtagaattgtggggtcaaatttctaccaatagatacctgtgttgcacatttaatatgttctaagcatgttctaggcactgaagacatatcgattaatcctcacaataatattaatgaggtaagtactgttgttttattcattttatagatgaggaacctgaggcttagagaggttaagtaacttgcccaaggtattattagtaaacagcatagccaggcaatgtgactcccagcatatgcttttaaccaccttccctagtagatactgaaaccttacctggtgaatttatgttggttactgttgtttatatctccttctccagtgtttccaatatacctttttttctgaggtgtgctaggattctcagagtggaaggaagttctagactctgtctgtcctgcttcccttaggaattttgctattttgagttcttcttcctcctgctgatagttgattattagcctcgtcaacttttcccaaattgtcacagggcttcaggcaaatcagaaaatggcccattttaacaaaaaaatttcaggcatttgaccaaaacaataaaataaacagttttatgaagcttatttggtaactaagttggtgtgcatgtccttgtgtaagattgttttgcagctgactctttttttttttttttttaattgagatggactctcactctgtcgcccaggctggagtgtagtggcgtgatctcggctcactgcaacctctgcctcccaggttcaagagattctcctgcctcagcctcccaagtagttgggattacaggtgcccaccaccactcccggctagtttttgtatttttaatagagatggagtttcgccatgttggtcaagctgatctcgaactcctggcctcaggtgatctgcctgcctcggcctcccgaagtgctgggattacaggcgtgagccactgcgcctggatgtagctgactcctttaatacattttgttgttataaaaggaaaataacaaagaatcaaaataagcatcgagaacagattatttccctgattttattacttttttcccttttgaataaaatgaaggatatgaatagttacatgtttagatataccttaatttattaacaataaagttttgttgggtgtggtggctcacacctgtaatcgcagcacaggttggccaagtcaggcagattgcttgaacctgggagttcgagaccagccagggaaacatggtgaaaccctgtctccacaaaaaaaaaaaaaaaaacttagctgggcctggtggcatgtgcctgtagtcccagctgctcaagagactgaggtaggaggatttcttgagcccagaaggtcgaggctgcagtgagcagtaattgtgccattgcactccaacctgggtgacagtgagaccttgtctctaaaaataaaaaagtttgttttttctttttgcatatgattatataaaccatgcttatttccatatcaaatatttcttccttttttaagcaaataagtaaaatgtgagtctctttcttatgttaaatctatttagagaatagcatctgctataatgtttaataatatttttatttgaaaaattacatttgcattgaattagttcagataataagcacttaccatatgtaaggcaatattcataatcaatgaaacaaacataaaacatggaccttcccttcatgggcagcatggcataatgcttaagatcagaggatcagaatcctatctccatcacttagaagttttgtggttttggacaagttacttgagatctttgcttcagtttctcatttgtaaaataaagatgatattacatacttcatagtgttgtttgaggaataaattaggggaattatatagtgcttcacatattgtaagtacttaataaatgttagctgctgttattttgacagtattatttactaatacgcatctgtagaccagtgtgctaattgtttttatattgggcagtctgtaaatccaaagtaattaaatagattgtttgactcattcattcaacaaatatttattgctcttctcctatttgctaggtactcttctgggagtggagaatcaaaagtgaataagatgacaaaatctgtgattttgtggtgcttatattttagtaagggacaaagaaagataatagaggatggtaagggtagtagaggaaaaggagcaaagatcaagcagcttcattaaacaaaagtacaagataaattcactagaaaaattttcttttgcagtgtgtcttatatttatgggttctgaagattctatacccaagcacattatttcttctgagaggcaaccatgaatgcagacaccttactgaatattttacctttaagcaggaatgtgagtactgccagaagaaatgttttcacttcctcagtattcttttggacttaagtgggtagtaagagttttgaagactttacagtgcaacatgtaaggacagatttcatgtccacacataaagctttgaggaaagttgtcgagcactctctggtgtttaatggtattaagaagtttttggtggggcatggtggttcacgcctgtaatcccagcactttgggaggcccaggcagggggattgcctgagctcaggagttggagaccagcctggccaacatggtgaaaccccatctccaccaaaaatacaaaaaaaaaaaattagctgggtgtggcggcacactcttgtagtcccagctgctcaggaggctgaggtgggaggatcgcttgagcctgggaatcggaggtcatagtgagctgagatcatgccactgcacggacaattgcctgggcaatagagtcagaccctgtctcaaaaaaaaaaattttttttcatttcagaatttcttattatgtttaacttttacaaacatacttagagttttatatataagttttaatgttacaattaatttttctaagccaggcacggtagctcacgcttgtaatcccagcactttgggaggccgaggcgggtggatcacctgaggtcaggagttcaagaccagcctggccaacacggcaaaaccccatctcctaaaaatacaaaaattagccaggcgtggtgacatgtgcctgtaatcccaggtactcaggaggctgaggcaggagaatcacttgaacctgggaggcggaggttgcagtgagccgagatcgcgccattgtactccagcctgggcaacaagagcgaaactctgtctcaggaaaaaaaaatgtatatattttttctaacaggaaaaaataaaaaccaaaagaaaaaaatgttattttgcattggagatttttgtccttcaatcttgaggcattcctgtgaggaatcctaacaaattgtttatcctgttaccattgcagatcatttcaatcatgctattaatgattgaaattcttcttaaaatttttttgtttttttaaatatcattgttttaagactagtcaggtacagttggtgaaattcttaacctgcaatgtttatcccttttctctctcaaattattatagcaatggtaatctaatacctgtaagtaaccatatgttacagaacaagattaggcctttttcacacctcaaacctttgtgcttttttattatttttgttatttttattttttttttgagacagtctcgctctgtcgccctggctggagtgcagtggtacaatctcggctcacagcaacctcctcccgggttcaagtattctcctgccttagcctcccaagtagctgaaattacaggcatgcgccaccacgtcctgctaatttttgtatttttggtagaggcggtgtttcaccatgttggccaggctggtctcttaactcctgacctcaagtaatccacctgcctcgtcctcccaaagtgctgggattacaggtgtgaaccaccgcatctggcctgcctttgtgctttttaagttaatatttatgactgtattaagtagagttaaattctaaaagcagaaataatttcaacgttttgagactcaaaacatgatccaataaaggtcatactaagtagagacttgcagcaacaggagaaaaatacagtgatgggtagtggcagaagtggcatactcttataacttcaaggatcaggcagttaacctaaatgagtaagataagacctggaaagtgcatgcttgacctaaaagcagtcaaattagaatttttattaaaccacagtgctagaaaacagagtcgttagcagactgccagtgtagaatctctggttgctggatatatatatagtttttttaatatttgaatattacagtattaaaacaggaaataggaactaagttctttttctttgcctagataaataacaaaccacctaccaaaatctcatcaaaaccaaaataggaatttaaagttgtaaaggagcaaatgaaagtgcatgatatctctctaaaagtaaatgatagtttgatttggtagagttttgtctttcttgtgtttctatattggcttcctgcttcactgcccattttaaagtattcattgtaggcaagaggaacccctcagcttttctgacatgagcatgctattatcttttatttttcagaaaaaatggatgaaccttgaattttgttgtgatgatgtagtcatcttgcctgtaataagaataaagtagtcattgactcttagaataaaataaagcaagtattaaaatgattttaacctcaagtacagttctaattttgccttatttggccgataaaggtgaagggttgagctgtttttaagagatttctttcttttttttttttttttgagacagagtcttgctctgtcgcccaggctggagtgcaagtggcacgatctcggcccactgcagcctccacctcctgggttcaagtgattcttgttcctcacccattgagtctctgggattacaggtgcacaccagcatgcctggctaatttttgtatttttagtagagacagtgttctgccatgttggccagactggtctcaaactcctggcctcaagcgatctgcctgctttggcctgtcaaagtgctgggattacaggcgtgagccaccgtgcctggcctgtttttagagatttgactgacttatttttaacaatacgtgatgacttttctgtcatccaaaataattttagagagcaaatattttgcttcataagacataacatcatcgagaataattttagagagagcaaatattttgtcttcataagacagataactttgcatatttttgttgattcttataggggaagatgctttccttaaaaaaattgtgtgcagtaagatttattctctgtggtatttacttctgtgacttttgacactgcatagagttgcccactaccactatcatgatacagaaaagttttatcatgccataagttctctcttgctacctttttatagtcaccccttcactcactctgaagccctggccaccactttgctgtttactgtctataattttcttgccatctgtctgtctgtctgtctgggctattactacagttgaaactgtaactatctcaatttcattataaatagctataagatataaaggaggggagagaacaagaaataaaaatctaatatatatgtttttaaaatggtcacaccaccaccagtaatgtaattttcaattagttttttgtttttctaggtaaaattaagtattcggaaagagtctatgaagcttgtatggaagcttttgatagtttgcctcttgctgcacttttaaaccaacagtttctttgtgttcatggtggactttcaccagaaatacacacactggatgatattaggagagtaagtatatattttacttccgagattgatttctatttatagtacattgttgagtagagcagaagtttcaaacttcacttcactgccaagattaggtaatagtaaaaattagtatactgatatcttaaggaaataacttctgtttattcacaataatatagtatgaactgtattcaaagttggtatcgttttcctatgcacattttatccttactttttgatgagttacttctgttctttcttttctttctttcacagttagatagattcaaagagccacctgcatttggaccaatgtgtgacttgttatggtccgatccttctgaagattttggaaatgaaaaatcacaggaacattttagtcacaatacagttcgaggatgttcttatttttataagtaaggaaaaatatccaagattaatcacattttagttgttaacatagcatatgcttcatacagaaaagccattattttacttaatttactctttttcccccacagctatccagcagtgtgtgaatttttgcaaaacaataatttgttatcgattattagagctcatgaagctcaagatgcagggtaagaattctgtttccctgacccaaattaacacctaaaatataaatcaaacttagtaaccatgattgatgctttacgatgcatattaagctatttgttttgcagctatagaatgtacagaaaaagtcaaactacagggttcccttcattaataacaattttttcggcacctaattacttagatgtctacaataataaaggtaagatattgttgataaaaaaaattgttaaacaacttagtattttaattgactttttttaatataataaaaaaggggtgttgtttgaaactattagtatccagatttctttataaataactgtaagatggaggggagagaacaataaataaaaatccaaaatgtgaaactaagtaatatgtaaccccattccacaacttgtctcttggaaaagccattttgtaaaacgtgctctgagttaagtgcatcaagcaaaaccaaacatgattttctcaaactcccctttcttaaatcttttcccttattgaggatgttttcttatttgtataaagctgctgctgctttgatgattttatttgcactgtctacttgtttagtttatcatgtttcttgttttatgttcactgatctaggttctctttccctttcttatttccttcttttacctccacagtcttatcactgccccatgaagatttgtatttgagcttttttttaattaattcagtttcatctcatttgagggatacattcttctctttatttttactgcttttttcctttgccttccgttccagagattttcatttccccaccttccctgaaaatttgacctgtctatagtaattggatttcattttattttgaatacagtttattgacagaaagtgccaaagggtcttaatctagttaagtgtgtgccaaggacattgaagatgagattgggtatgtttatgtagtttacatctttggaagatgatattaagaggccagcttctcttctgtcttgacatgtctggaattcagttgactatgccatagcttcaggatcagactggagtggatgtgccaagaggaaagaacagaaggttaaagactttaaaaaggacatttagagagagaatgaggtcattgctaaataagggtcatggtgtaagttcaaaagaggaacagaggaagtttttttggatgatgagaggtgatggttaaaagattaaaacacttgcctgagaccaaacagtagcatgctggataacttgggtacagaatatgctacaagaacttacactatagatatcttatgaaatatgacttcatttttgagaagaaacatatctaagttttgattccattctttctctctctagacagggtctcgctctgttgcccaggctggaatgcagtggtgcagtctcggccgactgctacatctgcatcctgggttcaagcaattctcttgcctcagccctccctaatagctgggatcataggcacccgccacctcgcccagctaatttttatatttttatagaatgaggtttcaccatgttcaccaggcttgtcttgaactcctgacttcaagtgatctgcctgcctcagcctcccaaagtgctgcgattataggcctgagccactgcgcccctgccctgattccattctcaaaaacagaaccaagtgttaaatttaactttctaccagtgctctaattcctcaactgtgacttcctcttgttaatattaagggagctagtgttcagtgtccagttgagtactgccttactgattgtcctttgttggtttgactcaggaggttaagggatggattttttttagcacttagaaaagaggctcaaaccattgactgtcttatcaaaaatcagatgtctctttgtagtcctgagtctgtacataaatagtgttaatggtttgagtgtttacgttgtatgggtatgtttgtaatttttcattctatccataaggcaattttctagatttttctctcttttatcccttacaaaagatctgaaagcttggtatcagctcataatttttgagactaatttaaaatactcttttttcccactttgaactgattgtcaaaacatataatttaaaatacttttatttcagatgggaatttcatatgggaaacaaacatatacttattaagttagtaaacagtaacatgtagcaggattacttttgattctctattagccacaatcacaaatgttggaatttaacatctgcatttcagtgcttttcattaaaatgaaaaaaaagtaaccataaaattatatctacaagacattttatacttttatgtattttcatgtgaaatgcattgtctgatcttaaacttctgtggtaggcagggtagacatattagtcctgttttataaatgagaaacacattagttgaataatttaccaagcattgcacagctagtatgtgctatagtttagatgagaatccagcccttctaacccagtgttctatacagtaatataaccagtaactgaaatctatgtaggtcatttaagattttaattatatcaacatattgaaacattagatacctgcatttgagatgaaaatgttatctctggattgtttggttataatattctcttttggtgttttagtaggattttttttctaaacaaagtaaaatatttctttgtagtaattttgtctgattttccatattaaatgaaacaaatacattcatacatttataagtaaaatgttccaaatgggtgggatttttttgtttgctttattaccattcagctatccttttcaggttgcctgaagctagaaagatcttaaattctcaatttgtttgaactttaaaaacctagaaaattgctcattgccattctgtgtttcctctaaaaactgagttttcacaattttggatttagtaaaaatgtatgttcatcattggattataaagtaaaacaaacattctggaaagaatctggaaatttcattagtaatgtgaagacctgactatagttatagttctacataacagtgttaaaaacaaaacctatgttattattaaaaattagttccttcctccctctaccagccctgattccactcacccccgatctcccttcctcttaatatttttctgcttttatgtattttatatttttaaggctaatgacaaatagttacttatctattaagttattgatgttcaacttatcttgcagctgctgtattaaagtatgaaaataatgtgatgaatattcgacagtttaactgttctccacatccttactggttgcctaattttatggatgtcttcacgtggtctttaccgtttgttggagaaaaaggtataatttttatttttaaaaaaaatttgttttattactgttacatttactccagtttactatcataggcacatacttgctaaaggaaaccaaagtctagtttcactgtggttacagctctccttgtgtcagtgggtgtggacataagagtctcaaagatattttagttagctgtttacagcccccatgtgaggctgtctgggggactgggagaagatttataaatagcccaatgtcttcagctgttggattttctttttttttttttctttagcttaaatcttttatgaaggggtggagagattgctttgcttgaaatgggcccttctgcatatcttaacaccatttttgggcattccaccgaaattcttggggaaatttagtagccttcattttagcaatattagtcattttaatagctgttctatactttaagagaaatcataaagagaaattcagattgtaacccaatattccttctcttatataaaaaatatgtataaaattttagtagtgatgcctttctaatttagaggaacacttgttagtacataataggctttttgagagaaaataaatgctatttaagaaattctgtttctgtgtttcatttgtagttctatagaattcttaggattttgttacctatcatgttcttttccattttaagttaatttttttcataagaaaatgcctcagtttccatatgtggaaaatgacattatgagagtacagacatgattataaaacattttgttcagtatccccctctattttttctcacctcttccatattacaaaatgttcctttctgtatgagatacgtcacttctgccaaggcaatttgtagttctgaaattcagaattaatacttaaactgtgtatgttaaacaggttttctgcagattgcatttggtgttcttcatttactcagtaggtccaatgttaatacggagatagaattaccctttagcatttgagaagggggccagttaagggcttaggtgcaagggatgcattacacttacaaccttctatctttggtgtatgagaaatagttcaatcatagcatcatcagatgaattaaataattcatcctgctcactctcctgccttcaggctagactgcaactcaactgttttaatgtaatatgggaaggatggaggggccaggaagataaggtaggaggaaaatggacatttcatagattctaatttgattctctgatagtcccacataaggaaatatttcgttatatctaatctaaatatttatgctatgagtatttaaacaaggaaagaaatagagataataggtttttctcaactaatgcacctgtcaaaaaccagggcatcatagggttttagagctcataagtggatataacagtcatttagcccaactccttttgagagatgagataatttaagatgaattctgtggatcccttacaagtgaagatggagaacagtaggcttttatcagtattcctgtatttgaggtctggtactaagtgatctttagtttttccattgccactctaaatcatcttttataaacaaagaaatattcaaactttttgaccatttttgttgtttttctttagatcttctctaaattattcacatctctctaaaaatgtaaagctcagattttaacattacatgcaaatagaattctagccagtgttgagcacagtaagaaaatcttctcaaactctttgcatattttgctattttaatacatgatggctgtttagatagcctgactacttcttgatggtaatgagcattttcttttggtgtgaaaagcagcaagtgacatttgttttacttcgaagaagccagctggactctgggtctagttcctgagaagcaggaactaacctaagccagaggcttcctgaaaggctgatttaatcccaaaattaggcgaaagcagtgtttccttacccttttgggagctaaaacccccactatttttttttatagagacagagtctcgctctgtcacacagactagagtgcagtggtgccatcatagcccacagcagccttgaactcctgggcttatgtaatcctcctgccttgggcttgtaaagcactgagattataggtgtgagccactgcacctagccaagaaccccttttctgtttcactaaaaatattcctacattggcctgtagtcccagctgctagggaggctaaggcaggaggatcacttgagcccaggagtttgagaatacactgtacaacaatcaaacatctgaatagccactgcaccccagcctagacaatatagcaaaaccctgtctctaaagaagtaaaataacttacattgggaaattttcaacatacaccaaggtagagtgaataatatgaatttcctatataccaattattcatcttcaacaattatcaaatcatagccaatcttgtatcatttatgtccccatccagtactccccacctcatacctcaattattttgaaacaaatctcaactcttttctatctataaatactttagaatatatttctaaaagataaagagtcacattttaaaagtacaaataaaaacatttattaattttttttttttttttgaggcacagtctcattcagttgcccaggctggaatgcagtctcattctattgcccaggcacaatctcagctcactgcaacgtccatcccccgggtttaagtgattctcatgcctcagcctcctgagtagtgggattacaggcatgctgtaccacacctggctaatttttgtatatttagtagagacggggtttcaccatgttggccaggctggtctcaaactcctggcctcaagggctctgtttgcctcaacttcctaaagtgctgggattacaggtgtgagccactgccaaaaacgtttattaatttcttaatatagaatccctttgagaatctgataaaagttatggacttttgcttcagaaaaattcatgtataaatgtatgtactcacaacattttcaggatggtcatagttctgaaatgaatttgcaaccttcacacttattggccctcctttaagaacctctgttctagaggatctaatattatatgatcttccatagaaggtcatacatgtaagatttatttattgactagattttttttaagtgttttattcaaggtaccaaggaaatacagatacaagtaagatgggtctttgcagattaatgtgggacctgtgatatatataaataatgataataagatgtaatatggtaagtgctccaagacaagcgtagttttataggaattgagatggctgggcgtggtggcttggggccaggcgtggtggctcatgcctgtaatcccagcactttgggaggctgaggtgggtggatcatcaggttaggagttcaagacccacctggccacgatggtgaaaccctgtctccactaaaaatacaaaaattagctgggtgtggtggcgggcgcctgtaatcccagctactcgggaggctcaggcagagaattgcttgaacccaggaggtggaggttgcagtgagctgagattgcaccactgcactccagcctgggcaacagagcgagactctgtctcaaaaaaagaggagaggccgggcgcagtggcttacgcctgtaatctcagcactttgggaggccgaggcaggcagatcgcgaggtcaggagatcgagaccatcctggctaacgcagtgaaaccctgtctctactaaaaatacaaaaaattacaggtggcgggcacctgtaatcccagctactcaggaggctgaggcaggagaatggcgtgaacccaggaggcagagcttgcagtgagccaagatcgagccactgcactccagcctgggtgacagagtgagactccgtctcaaaagagaaaggaggttatttctgtcagagggattaaagtagcttttgaacaggggcttgaagaatggtggaattgtgctggtggatatgagcaacagaattctagataagagaacttcctgagcctgagtctgaaagcaagaaatcataggtctctttgagggtttaatttgattagtgagtaggatctatgaaggacagtagtagaaaaagaatgaaaagttaggttagggctagatcatgaggatattgatcaccacacagagaagttggaactttgataaatggtgagcaagccattgagatggaatttgactgtggtcgtcatttagaaaaattactgtggtgaagtagactggaaggaagacttgacgttgagagacctgttatgaagttacaccagaagtcaggtagagacataatgaaggcctggtagcattaggaacggagagtggggagaaccaaaagaatggtagaagtagaatcagtgagacttaacaagattacatatttaagggtagggaatggttggagatgacttggatattttgagtctggtgaagatagtgccattaacacactccaatgagaaaactcttgttacaacaaccctttactcaggttactgctgttcttcatgttcattggaatctctaggcctttcagtatgtcattttcttcctttttttttttttttttttttttttttttgagacagagtcttgctctgtcacccaggctggagtgcagtggtgtgatctcagctcactgcaatctccatttcccaggttcaagcagttctcatgcttctgcctcccaagtctctgggattacaggtgcatgtcaccacacctagctaatttttgtgtttgtcgcagagacagggtttcgccatgttggccaggctgctcttgaacccctgacctcaagtgatccgcccacctcaacctcccaaagtgctgggattacaggtgtgagccactgtacccagcctaactaagtcattttcttactagtcaaatccctttttacctctcttccttattaacataccctcaaactcctttcttttctgtttttctacttcatttgtcctataaatcttaggtctagtcaaatccagccatccattttctccattcctacagccacagtacagagtgctgctggagatttttacggacttgtgaattggcaccaccccttgatttataacattagctgagctcccagtaggaccctcataccgtttatatccctagtctgcttttttctcccattttgcttaggatagagtccaaattttccttttttaaaaaattgtataaagaaaagagggccaggcacagtggcacatgcctgtaatcccagcactttgggaggctaaggtgaaaggattgcttgagcctaggagttcaaggctgcaggctgcagttagctgatcactccactctactgcactccaacctgggtgatagaatgggactctatctgaaaaaaaaaaaaaaaaaaaaaaaaaagaaggagtttaattggctcgtggttctgcaggctgtacaagcatagcacctgcatctcctcggcttttggggaggcctcagggaacttctcatggtggaaggtaaagtgggagcaggcacttcacgtggtgagagcaggagcaagagagcgagggggaagatgccagatacttaaaaaacagccaaatttcacaagaatttactcactatcgtgaggacagcaccaaagggatggtgctaaactattcatgagaaatccacccccatgatccagtcacctttcaccaggctccacctccaacactggggattacaattcaacatgagatttataggtgacaacatccaaactatatcattctgcccatggtccctataatatcatgtccttctgatatatcaaaatataatcatctcctgccaatggttccccaaagtcttaactcattctagaatttaaccgaaaagtgccaactccaaagtctcatctgagactcaagcctagttccttctacctatgaacctgtaaaatcaaagacaaattatttccaagacctaatgaggatataggcattggataaaataaacattcctgctccaaaagggagaaatctgctaaaagaaaaggggttcagacactatgcaagtctgaaacccagcaggcagtcattaaattttttttttttctttttgagacagaatcttgctctgttgcgcccaggctggaatgcagtggtgtgttctttgctcactgcaccctccgcctcctgggttaaagtgattaccctgcctcagacccccaaatagctgggactacaggcatgccccaccatgcctggctaatttttgtatttttagtagagacagggtttcactatgttggccaggttggttttgaacacctgagctcaagtgatccatgcacctcgacctcccaaagtgctgggattaaggtgtgagccatcacgccagtcattaaatcttaaagctccaaaataatcattgactccatgtcctacatcctgggcacactgtttcgatgagtgggcagttctgtccctgtggtttttccacactgaggttgcaagctgccggtggctctgccattctggagggcagcagccctttctcacagccccactaggcagtgcctcagtggggagtctgtgtggggcctccagccctgcattttcccttggcactgccctagtagtgtctctctgtgagggctctgcccctgggcacctaggctttctcatacaccttctgaaatctaagtggaaaccaccaagcttcattcactcttacacttgcctaggggtttaacaccaggtggtggctggtgctggagcagtccctggctgtggggagcagtgtcctgaggctgttctggtcaatgggctcctccctgacccccaaaactattctttcctcctaggcctctaggcctatgatgggatgggctgcttccttttttccattgtcttggctattagcacttggttcctttcatatttttttcttaaacattttcttctatccatttccctcactagtgaaaacacattagtagttggagtgttctctacttactgttttcttcctttatacagtacccttatcttgaattcttcccttgttgaagaggtgacccttccattcaagccagtctaacttgtctctagattctattacctttctgctttttcaggaaacttgctttatcgtttatgtcctctatatcttcacattctcagtactagttcttttataaattattcaaatctatctgatctttaaataaataacatttctctcatctgatgtcattttctaactactgtgctgtgactttttttttttttttttttttttgctattactttcttgcctttctttcagaagccaagtttctggatgaaaatgtatactttaaagctacgatttaatatccgttaaatggctccatgtagctttcgagataaaccttaacctgtcaacacaaagtccttggaccttccctactttctcttcagcctcatttcctgcctttctctttcacgttatcttcgttctagccataacacagcaaagccagttttctgaacgtgttatgctctttaagttttataccctcatacttttctttattttttataactgctttattgacatgtaattcacataccataaagttgacctatttaaattgtacaattccatgttttttatatactacagagttgtgcaatcattaccacagttttggaacattttcatcatcccctccaaagaaaccctgtgcccattagcagtcactcttcattttcccctaaccccccttgctaaccctaggtaaccaccaatctgctgtccccatagattcacctattctggacagttcatataaatggaatcacacagtgtgtgctcttttgtgactggattctttccatggtctcaaggtttatctgtggtgtagcatgaagcagtacaacattcctttttatgatggaatagtagtctattgtatggatatagcacattttgtttgttttattcatcagctgatagacatttatttctactcttggacttactaataatgctgcgaagaatatgcatgtgcaagttttatgttttcattttctttttgagacagaatcttgctctgtcgcccaggctggagcgcagtggcgcgatcttggctcactgcaagctccgtctcctgggttcacgccattctcctgcctcagcctcctgagtagctgggactacaggtgcccgccaccatgcccagctaatttttatatttttagtagagacagggtttcactgtgtagccaggatgatctcaatctcctgacctcctgatccacccgcctcggcctcccaaagtgctgggattacaggcgtgagccaccatgcccggcctatgttttcattttcttgagtatagacctgggagtgaaattgctgggtcatattgtaactctatgattaaccttttaaggatctgccaaactgttttccaaaacagctgtaccattttattgttgttgttgtttttgagacagagttttgctcttgttgcccatgctagggtgcaatggtgcgatctcggctcaccgcaacctctgcctcctgggttcaagtgattctcctgcctcagcctcctgagtagctgggattacaggcacgcaccaccacgcccggctaattttgtattttttagtagtgacggggtttctccatgttggtcaggctggtctcaaactcttgacctcaggtgattgtcccacttcatcctcccaaagtgctgggattacaggcatgagccactgcgcccggccttagctgtaccattttacagtttcatcagcagtgtatatattctttggatgaaaaaatatatatattttaataaatatacattttaatatataaacatatactttacatatgtaaaatatattttaatatagaaaatacatgtatattttaatatagagacagggtttcgccatgttgcccaggctggtaactcctgagctcaagcagtctacccgctttggcctcccagggtgctagggtgacaggcatgagctaccacacccagccgaggatgaatatattttcaaatcctttgcttattttataattgggttatttgtcttaaaattttctttattaaaaaatttttttgccaggtgcggtggctcacacctgtaatcccagcattttgggaggccggggcgggtggattacctgaggtcaggaattcaagaccagcctggccaacatggtgaaaccctgtctctactaaaaatacaaaaattagctgagtgtggtggtgcgtgcctgtaatcccagctactcaggaggctgaagcaggagaattgcttgaacctgggagacagaggttgcaatgagccaagatcacaccactgcactccagcctggacaacagagtgagactccgtctctaaaaaataaaacaaaacatttttttgttgtctatataaatttatgaagtataagtgtaattttgttacatagatatattgcatagtggtgaagtcaaggcttttagtgtatctatcaccagactagcatacattgtacttattaagtaatttcatcttccacacctctcccacctctctacccttccaagtctcctttgtctatcattccacactctacctccatgtacatatattatttagcttccacttatgagaacatgcagtatttttctgtctcagttgtttcatgggagataattattgagttgtgttttttagatattctatatgcaagtcccttacgtatatgatttacaaataattttctcccattccactttcactttctttctttctttctttttttttttttttgagacagggtcttgctgtgtcacccagactggagtgcagtggtaccatcttggctcactgcaacctccacctcccagattcaagcgattctcctgcttcaccctcccaagtagctgggattacaggcatgtgccaccatgcccggctaatttttgtatttttagtagagacagggtttcaccatgttggtaaggctgatctcaaacttctggtctcaagtgatccacctgctcagcctcctgaaatgctgggattacaggcatgacccccggcctagctgactttcactttcttgataatgtcctttaggctttcactccatcatctaggctagaatgttggagtgcaatcgtaactcactgcaatctcaaactcctggactcaggcagtcttaccgcatggccttccaagtaggtaggactacaggcatgtcctaccatgactagcttttttttttttttttttttttttttttttcttttttagagatgggatctttgtgttgcctaggctggtctcacacaaattactaggctcaagtgatcctccttcttcattctcccaggtagctgggattacaggcacatgcttccatgcctgattttttttgtcctttgaagcacaaaagttttctaattttttaaaaaaatacattttattgtgtatatttaaggtatacatcgtaacagctttattgaaatatatatactatgcaattcatctatttaaagcatacaattcagttggttttagtatatttctagagttgtgtaaccatcagaaagactaatctttctgtctctatagatttgcctttgctagacattttatataaataaggtcatatggtatatggtattttgtgactggcttctttcaaaaagttttttaattttggtgaagtcatatttatctgttttttcctttgttgcttgtgtttttgttgttatacctaagaaatcattgcctaatccaagctcataaagatttgcccgtttttttctgagagttttagttcttacattaggtgtttgatccattttgaattaatttttgcatgtgatgtgcagtagggggagtgcagtttattctttcgcatgtgaccatttgcagctttattcttttgtagttgaccattgttgaaatgactgttctttagccactgaattgttttggcacccttgtcaaaaatcaattgaccttaaatatcaggttttctttctggactctctgttctgttgtgataaatgactactacatcacttttttaacttctgtttagaatgccttatctgccctctccacttggcaaactcctagttcatgattcctctcaaatgttatctagcaaaagccttgccttccccagcaggtcttccccagcaggtcttttgcatatctttgaacacttacagcatgttttccatcaaccttttgcagttgatatttaatgtctccttcagtagttagtaagcttgttgaaggtagagactgtgcctttcatatctgaatcctagagctttaatgtagtacttgacatgtggggtgcttttagtatatttattagcaggaaaaagtggtttgtagaagtattgaattttgttttggatatgttcatttctaggtgccttcaggacatctaggtgctaatattcaatagacatttttatttattaattgaaatttgcttttatctttcttattttgtgtacttatttgttagatatttattgagtacctgtcatgtgccagggcacagtgccaggctctgaagttataatagtgaattaaacaacatcctacactcatgaagttttcattctagtaggggaaacatacagtatacaaatggtttaagacagttgacaggctgggcgcggtggctcacgcctgtaatcccagcactttgggaggccaaggtgggcggatcacgaggtcaggagatcgagaccatcctggctaacacggtgaaaccccatctctactaaaaaaatacaaaaaattagccgggcgaggtggcgggcacctgtagtcccagctactcaaaaggctgaggcaggagaatggcgtgaacccgggaggcggagcctgcagtgagccgagatcgcgccactgcactccaacctgggcgacagcgagactccatctcaaaaaaaaagacagttgacaataaaactagccaaggacatctagagcctgaaggagaggtcaacactggagatacagactttggagtcatcttcaacgaggtgataattgaaactgtaaatatgataatagacagaaattccaagtgattgaacatataggaggaataataatgcagagagaatcttgaggatatccaaagttttggggaaaaatgatccaaatgtgggaaaaccagaagagcagaatcttgggaaccaagggaaaagagaaggaaaaaaatatacagaatagtcaaagaggattaagcctatgaaagagccaagggttcagattgttagatagtcattagtaatctttagaagtaaatttcaagagagttgctgagccagtttttaaaagattaaggccaggcgcagtggcctacgcctgtaatcccagcactttgggaggccaaggcgggtggatcatgaggttaggagttcgagaccagcctgaccaacatggtgaaaccccatctctactaaaagaaaaaaaaaaaatacaaaaattagctgggcatgacgatgggtgtctgtaatcccagctccttgggaggctgaggcaggagaatctcttgaacctgggaggcagaggttgcagtgagccgagatcacgccactgcactgcagcctgggcaacagagcaagactccatctccaaaaaaaaaaaaagattaaatcctgagactttttggaaccactaaaactctgccatgattttttttcttattatgctatatccatgaatgaagatttgaaatgtatacattcagttgttattcatctctgttcttatctctatggggcttcatttttttttttttttgagaggcctgaaaatttgttccataaagaatctctttctctcagagttgttatccactgaatttctttcattttgaaagcctttgcatttttaaattccatcgatcttggtataagaatgtgtttgctttcttgggctaaacattatttgaccatttgtaaaaatagttgctatgtgtatgtatagacagttatatatggtcagctaacatgtaacttttttttcccaaatagtgacagaaatgttggtaaatgttctgagtatttgctctgatgatgaactaatgactgaaggtgaagaccagtttgatggtatgattattcatcttactatttttttttttactgtgaaatggtatttctttactgcctagcctcagtacacactattttgcaaaaaatagtcattgctttcagagactatgctatttgataagtaacaagttactttttttggatattaagatttgaaaataatttcagtgatttcatttttttattgtaatatggggaagaagatgaactttgggaaaggagaaatttggaagaaagaagataaggaaaggaaaattgaagtgttaaaaggatgtagttcttggcaaatatggacactggttagagaaaagaggataaaaatactatttgttttattagaacaatattcttagtgcatcagaagcatacctgaactcccaattttgcttttcctgccttttagacactaaaatagactgcttctaaattagtgtgattgtgttctaaaagaccacttgctaatttagtttcagattctgaaagcatttttttccacagaaacaaagttatacatggttgttgttacgtaagccaacaagcctatgtacctaatgcatgtttatagtaaaaagtaatactatagaaacaattcattttattttgttttgaaatttttatttaaaactttattatttaaatgtttaattaaaacctgagtacataaaaaggtaaacaatatataaactgaaaacgattcccttccatattcccctcatatctttgttgtagtatactttttatagttgtaatcaatatttcaatgtttccgtgtattaaacatggtctgtatattggtaagatttaatagctacgtatttctaagtccattgataaactataatgtttggctagatgtggtggctcacgcctgtaatcccaccactttgggaggccaaggcaggaggatcccttgagcccaggagttggagaccagcctgggcaatatggaaagatttccttgtctgtattaaaaaaatatatatatacacacacacacacacgaaaatttaattttcataatctcattgtttggcaactgggttctaaattatccttatgaatagcagtaaaataaacatatttgtataatagcttttattttcctccttggaataaatttattggagagaattatagagttacagaattaactctgtaattcttttagcttcatcgttttagctgtgaactaccagattgctttgcagaaggattggaccactatgaagtgcctccagcaaggaatccataaacatatttctccacaggactacctcattggattttggtcatttttacttattttcttcatggctatatagtagtaaattatagttgcttaagtttacatttctttgatttctaatgatgctaagaagaaaattactgtttttccaactgtgtaaactatccatttcatttgatcacttttcgagtaaaatctgaatgaagcctatttagaaatttctttacttacaaacaggtttgattcttaaacatttgaaagcccatttgttgaaagtacaaggtaactgtacaagcgctaccattgccatctgttagtggtaggcagagatgtgcttttattcttacacatttgttaataactgacatagtatatttattatcagttattttttagtttggatagtaaactttagtgaataataattactcttccttattttaattctctttcctttttttttttttgagacagagtcttgctctgtcacccaggctagagtgcagtggcgtgatctcagctcactgcaagctccacctccctggttcaagcaattctcctgcctcagcctcccaagtagctgggattacaggtgcccaccatcacgcccagctaatttttgtatttttagtagagatggggtttcaccatcttggccaaacttgtctcgaactcctgacctcagatgatcggcccgcctctgcctcccaaagtgttaggattacaggcgtgagccaccatgcccagccattgaatagtttcaaatagatattttgtttccctgttctgctgtcactgttttaagaatagacctgggctcagattctagttccttctaatggctctgtggcatcagacgacttacttaacctttctgagtctcagtttctctcatgttcaaagaagtgacagtaatacctacttcataatgttgtaggtattgagataatgaataattgaagtaattattgccacatagcctacttttttttagaaagttttctatttttcaaaatctgtgaaatatttagtgagagttttaattgatattatgttaattctatatctgaatctagggaggttttttaaatttttttttttaagagatgaggcttccagccgggtgtggtggctcacgcctgtaatcccagcactttgggaggctgaggcgggtggatcatgaggtcaggagatcaagaccatcctggcttaacatggtgaaaccctgtctctaccaaaaatacaaaaaattagccggtcgttgtggtgggtgcttgtagtcctagctacttgggaggctggggcaggagaatacagtgaacccaggaggcggaggttacagtgagtcgagatcgcaccactgcactccagcctgggcgacagatggagactccgtctcaaaaaaaaaaaaaaaaaaaaagagatgagtgaggtttccctatgttaccaaggctggtcttgaactcctggcctcaagcagtcctcccacctcagcctctcaaaaagcgctgggattacaggcatgagctaccaggcctggccaagtcttttgtttttccttccttccttccttcttcctttctctttctttcttttttaaaaaatagtatttagttttccaaactaagaccaagaactcttgctctatataattatttactatttcctccatttaaggttatatagtttttctttgaaaaaattttgtcattatcaagttaaattaatacatctgtattttatgttcttattactattacaactggtgtctcttattttctatctgtgtaaaagaatatactatatatttgtgggtttatcttatatctaacaaacttgaatcagcagaattattttctatgataattttaagtttgttttctattacttttaaaaatatgtcatttataggggattgatattgttatttattttctgtatttttacctttcttttattctttaaaagttattatgagtattgcaatagtatgttaaataggcatgatggtagataatgctttagtcctcttcttataataataagaaaaaaaggttccttgttaagtctaattatagtacttggttttaggtacctatgatttatatgaataaagatactgagtcatattttgagatggaaccagaaataaatataaaattttattatattctaatgagaagattttatatatcatcagtatttttcctattagtatgataatttatccacttgttattatcattcttgcattccagggatgaattgaatttgatcattaaagaggcagtgtagtttaatgaaaaggatcagtggtttaggtgtcttgtcactaccgttcactagctgtgtaatcttagaaaaggcacctaatttctcaggttttcttattcagaaactgagggaatagagaggatgaaaattctttcccactcttaaataattttaaaaattgttaagcaccatttatgacaatgtttctatgggaaaatacactgagttccagctttgaatattagaaatagatctccctttactgctaacagggcaggtacaattactcttcattgttttcactcttccagtaccacgtattaggagtagggactctaagaaagttttaggaatatgagtctgggagtttgcatggagaaatgggaatggtttgaaagagaaaagaatgttgaggaaatggaggacagaggaggagattcggatagatactaaggtttaaagtggggtagggaaagagctactggaaataggtttatttcccttccttatttgtactccctgatttcttccctctaactccctccatcttttctcctttcctttcactgtaatggcgtgccttctgttctctccttcctcttttcctacacaacggtgaaccattctatggaactggtctggggagatatctgactttagaaagaaaacttgatgggatggctgtggaatcagagtaagggtttagtttttctttggggaaagagagcgggattggagatttctgagtgtcaggaaggaagaagtaatttttgtatatttaaagctaagatggccgggcgcggtggctcaggcctgtaatcccagcactttgggaggctaaggcgggtggatcacctgaggtcaggagttcgagaccaacctggccaacatggcaaaaccccctctttacttaaaaaacacaaaaattagccaggcatggtggtgcgcacctgtagtcccagctattttgaaggcagaggcaggagaattgcttcaactcgggaggcagaggttgcagtgagccgagatcaccccattgcactccagcctggttgacagagcgagactcggtctcaaaaaaaaaaaagctaagattaggtaaaggcataagactgttgttaagtggtaaatctttggtgctctgtattgtttaatgtatgtgtggggtcatttttaagacaaaaatttgcattaacactaatgtataaacccacatagcatccgttttagaagtgttaatcataaaagagaatttttgaaaactgatttctgtgatatttaggttgcatgcagttttttccaggtgtttatcttttgtcttcagtttggtaaagggaagtacataatccatatgtgttgcagtttcactaaaataaatacatttcctataaaggaataatatatctcagcattagaatggaagatatggaaagctcaaatgaaaccaccccagctgcctactcttagaactgttacttgatttgaaacaatctgttgctatttttgcaaaaagatgtcccccaaatttcccagattggactggggacagaaagcacatactgttgctcctgagtatatgcaaaagttctgcaattcagatttaggaaatcatgtgctcttgttagggaatatgggaggtttagcttttccttcgttgggagggggtgaggttttctactgaggcagtttataaagttacctacatttctctgaatgtactacagattttgcagatgttggtgtccttgaagaaccacacaagtttgtatttcatttgtgtcattaccttttacttaacatacttccacaggtgacacatttccttaggggtatgactataaatgtgcaatatttgttagcagtcttttttcagtcttatgtgttttcacatgtttttttctgtccctaattatgtctgcttccatcagatatgatagttattctgtccataatttcttccatgcacatgtcttttaagaaatctttactttagagttctacctagttgcatccctctttattcaccagattctacagtactacatttttcaaatttccaaatatgagggccttcatttttctctctttctacattcattcttcagtaccactgccaagttaaatctctatctttttatttgtcccaaccaccttttctccatcattcacttccttttttctggactctccatctgaagaacggctcatatatggcaataaaaaaggtacagaccagacagagtaacattgttttgaaatatgacttcataagttatcttcatgtccatgtaagttagcacattcattgagtaatgtctatgcagagtcctcttgggccttgtgcaaatttagcttaagttttatctgtgttagtgtttggtatttttagaagtcatattccaagatatctgtctttctgtgcatggaaatattttccctccttttcattcctgttttaaaatttcattcttttgcttatttgtaatgttttgtacttttccctgcatgattagggttgtttgattgtctattatttcccaaagaaatgttactgtgaccatttactttaatatgatgcatgatgtgtttgtagactgatttaaaatcctgatttgtacagtgtttttatattcctgtgaatttttcatttgatatcagtatagtttacatgtcatttggttttatagatatagaaattaaatctgaaaatatgaatgtacttattacagccatcctccccaacaccctactgcttatccccagtctagctactttaaaattctgtcaattttaaaacaaaatgtttataatcatttattagaagagaatcagacttaccttctatccttgaacaagtcacttaataacctcagtttctttgtctataaaatgaggagattgcactttatagtatctccattgtctcttcaaattctaatattctatgattcttatatttttagtttttgggggtttttttgtggtttttttttttggtattttaaaaatacctgtttagagtgctgtggtacccaggtacccacacagttttggacttgtaaaagctgtagcttcagtgctcataatatttaccctttagaagatcataaacatgtcatggagcctatttttttcccctaaaatatgtcttttgtttctgtctttcaagttggatttctttttctcttttcttgcagtcagatccagtcattatcttagtttttaattatatgtaattgtggactgcttgaattttaaatgagatgttctctcccagaagacttacagttgttcagacctctgtatacctaaggccccttttgaattagtgtctttagcctttccttaaccttctcctcaaccatggtgcttccatgtgtgttttcattgtgttgaagcacggctctaaggaaccacacttttgggtccagagtgattctagttgctatatatgaaataacaggactgagattgatgttgttctttctggaggccaagggaaggaagataaaacctttgagtcattcttcagccaaggatttagttattttggtttattctcttctacatcagttgtagacagcacagctaaccctttagagatgaagcagtagtgatcctttagccatgtttttcttgttgcttatgtcatactcacctagagatgtaaaagattgtatatatttgcatgaccttaggagcacctggtacattaggcacctggtgcattgttgaaatgctggtatggcccttagttcaggattacctgcacagtagctccttcatgccattcattttagaccaactcaaagcaaagaagcttattctgtcatagtctgatgggatattgtcagcctgcatgtcaaatactttgtgatagttaaataagactacaggactgttagaaattcttgtctgttagtctgcatgccataggctgtcatgaaaattaaacagagactataggattattatcagtttttgccctctggtttgtaatgcaagttgggctcaagtttgtttgtttttttttccccattgctgttttactgattagccagtagagtgaaatattaaagtttgtggattactttttatttctatatttatcagaccccagtattagaccaatgctgagctaaacattgagagagcaagacattttttagcatgagttcatctagtcccctccatgtaagctggtggcaggggtcttggtactggtttagatgagtgtggaacaggctaatagaatattgtaagcatgcatgccctaaacttgagcctttctctctatttattccattgaaagtaggttcagctgcagcccggaaagaaatcataagaaacaaaattcgagcaattggcaagatggcaagagtcttctctgttctcaggtaatgatatattttcttgattatttgttttgcagaaattacgtttattgtaccttgttacaagcattgtcccgcatctaaaagcaaaatggggccgggtatggtggcacactcctgtaatctcagcattttgggatgccaaggcgggcggatcacctgaggtcaggagtttgaaaccagcctggccaacatagtgaatccccatctctactaaatatacaaaaattagccgggcgtggtggcatgcacctgtaatcccagctactcgggaagctgaggcacaagaattgcttgaacccaggaggcagaagttgcggtgagccgagactgcgccactccagactgggcgactgagcaaggctctgtctaaaaaaaaaaaaaaagaaagaaaaaaagcaacaagcaacagggtatcattcttcctataaagaagttacttaggcctggccaggcgtggtggctcacgcctgtaatcccagcactttgggaggccaaggcaggtggatcacgaggtcaagagattgagaccatcctggccaacatggtgaaaccctgtctctactaaaaatagaaaaattaactggatgtggtggtgcatgcctgtagtcccagctactcgggaggctgaggcaggagaatcacttgaactcgggaggtggaggttgcagtgatctgagatgacgccactgcactccagcctgggtgacagagtgagactctgtctcagaaaaaaaaaaaaaaagggtacttaggcccttaggctgggtgcagtggctcacgcctgtaatcccaacactttgggaggccaaagcgggcggagttcaagaccaggctaggaaacatggcgaaaccccatctccacaaaaaagaatacaaaaattagccgggcctggtggcatgcacctgtggtcccagctactcgggaggctgagatgggaggatcacctgagccccaggaagttgtgagtagtgagccgtgattgtgccgctgcactccagcctgggtgacggagtgagaccttgtctcaaaaagaaaaagaagtttatatatttgtatactgaagatgggaacacaagtccctttgaagctaagatttttgactctggtgattgttattgctcatctttggtatctcttttccgtttgtgataacactaaattcacaccttgaaaattagagcaggataagaaggaggggatactttttagagtattcttgatgaacttgttcatccatataggaagtcccttgtgctggagccataaattgccttccctggggttaattcaggaagaccaggttaaagggtacaaatgaataggtcagtctttaaaaatttgtttgcacaactgactacatcagacatttgaacttcagagcatatgaaataccatattttctcaatagtatgatgccccttgatgaatcttaccacatatttaataaagcttttcaggaaaaacaatatatgcctcaatggtaaggcacaccctcatacctgaaacacttaaaatatagaaaaattaatgtcttgaaattgaggaaaatatggtaatagcaatgaatgtcatgaattttatatatggcctatatctagaccctatgtcttcttttaaattaagtacttgttggaagtatctgatatttgttatatctctctgctatagggaggagagtgaaagtgtgctgacactcaagggcctgactcccacagggatgttgcctagtggagtgttagctggaggacggcagaccctgcaaagtggtaatgatgttatgcaacttgctgtgcctcagatggactggggcacacctcactcttttgctaacaattcacataatgcatgcagggaattccttctgttttttagttcctgtctcagcagctgacctagacagggtactgtattagctagtgtctcattaatacctgatcagggcagaaaactgatagaatgggtattcctttcaattgaaaataatggtcagttcctcagcttttcatgaaatgatatgggagcagctcatatcataatgtctgaaatatttatttattcatctgtctaattcacccttttcttttaaaagccccagtttcagaatgtgaatcagggatattcctgttactaaaatggaaatgtaattccaagtttcttttttaattttttaaatttatgtcattgtattggactatgcttatatttaaaactacttaatttagagttaactacctgcttaggccccagaacattacttatgcccttcagttaccaaaagatttgtgcaaggttttgtaccctggtaaatgatgccaaagtttgttttctgtggtgtttgtcaaatgttctatgtataattaactgtctgtaacatgctgtttccttcctctgcagatgtagctgctttcctaaatctgtctgtctttctttaggttagctgtatgtctgtaaaagtatgttcaattaaattactccatcagacacttgtctgtcttgcaatgtagaagcagctttgtagcaccttgttttgaggtttgctgcatttgttgctgcactttgtgcattctgaacatgaatgtaacattagatattaagtcattgttataaggggttgaatttaaatcctgtaagtcaaaattgaaagggtgttattaagtgtgcctttattttgcatgaaaataaaaagaattatacgtaaagcattcctgtaatctggctcattgaatattttatacttaaaaaactttttttggcgtaaatatttgtgtaaatactgggttaactttttaaaagcccattacagattaaatagaagagagtgatgtgagtattagtgaccatacacagtaattcagtctagatttcttttcctgtggttggaaagcaaaaatacatgatgtggaaaagcctgaatttcttgtagtcacttttgacagccctctaagggtcattgtctattaaaatagcaacagatctgatgttttccttagtcataattaggtttctttttggtgttgtaattagtgacttttttagagggaaaaaaataggcaattttaacgttttgaatgaatttacatttgacttcacaatttcatttcacttggttccataataagtgctctttttttttcttttctctcttctcttctctttctttttctttctttctttctttctttctttctttctttctttctttctgtctttctttctttctttctctctctctctctctctttctctctctctctctgtctttctttttttgtgtgcatgtgtacatgtgtgtgtgtgagagagacagacagggtctggtttcttgctgtgtcacccaggctggagtgcagtgcagcctcaacctcctgggctcaagcagtcctccatttcagccacccaagtagctaagaccataggcacatgccaccacagccagctaattttttttattttttttattttttatttttttatatttttgtattgcccaggctggtctcaaactcctgggctcaagcaatcttctgacctcagcctcccaaagtgctgggattataggcatgagccactatgcctggccaatgattgcttttcaataaaaaaaatttttttcctgtaaacaatttttacttgtagcctatacatgttctattttaaatgtcattgtattgttcactaccaccactggtatatctgaaaagtacactgtgttttgaaattataaattttcattctgaatgaggtttctttttttgattttctttaaaaaaaaaaaacaacctgctttgatttgctttacattccttgccctccatttttcttattatattgtaaacattagaaaaatgaactaaaaagaatttcatgaatgtacattaaaacaagatcttaaacatttgataaaactagtaaaaatgttaatagaaaaggatgaactttaatagcttcaaaaatattatactcttctttgttcagaaaagaaaaataaaaccaaaagggtatcatacttaaataaatctacagtatagtcatctctcagttatccttggatataacattacttttatattgtatccgcagcaaaccttgctttcagatttcacgattagcccctgctaattacatgctttgttgacttctgtttattcttaatttgtacacggcttgaagctcattccttcaactttgaaaccaccctcaactgcaggggaggtttgaaagacagcagctttgctggagggactctctattctcagcatggactaagttactggaaggaattgagtttaaggggtctaatttgggaccccttaaactagatagcttctagttttgctagctcttgatagtgtggtttgggcatttggtcaaaattattttcctagcataagataaatccactttgaaacaaataacaaaggtcatacaaaagctgcatgtttgtgattattttttaaaaagttatcctacattttaaattttagtagataatgttccctgatgttagtgtgtataactgagagttaggtattgcaaaaggaaaaaattttaattctaagacctcgtgcctatttgtcagaaaataaaaattgtcgtttcaagaactttaaaagttaatttacatgatgtttcttgagtgtttttacaaactgcacaactctattggaggtggattttctgttcatctttattttatgtatgttttctttctgggaaatttgattgggagctagcactgtaatgctaccctcaccaggatctatatgggaaatatatgtggccaattctatgttagtaataccaaattcctcttggtcatttatcttgcatagtactgaggaacacagtttgagatagcactatgctcaaacttattaaggccatgacaagatgccctatataactgaaaacaaatagaggagaaatagtgcctttcagatagagtgttgcaattagcaatctgggctcaagtgatcttcctgcttcagcttcccgagtagctgggattacatatgcacaccaccatgcccggctaattttttaaactttttttggggggagatgaggtctctctatgtgttgcccaggctgggctcaaacgctcaagggatccttccacctcagccatccgagagtgctggggttataggcatgatcttccatgtcctgcccgatttgtaatgtagtttaacagttaaggaaaattaactcttcctttattcagtgttcgtcctaattcttttgggtccccaattcactttactgtctggttaagatcaacattttctaacttagttcactttaataccttagattcatcagtttcttttacattaataattgctttggataaaattatttctaaatcatgttaattgctaaaagatcacttcaggaataattattctaattggccttattgcagaagaagcaaaataggagagaccagggcattacttttacaaatattctgagtaataaggggaatggacaatattgtaaaccagtattgttgtgtgctatcttgagtcctggtcctcagtgtgagctctttatacagttcaaacccagaaatgagcgaaaaaaagaatctttgactataaaatgtttgactaattatggtgaaattctctaaatggaccagtgacacactataccaataatgtatttcttatttataatatgacctatgtgtctatatcatgaaataattagaatttatgcctgtaagacctcacttctcttccttaatgtctctttaattggtagatgagtttgaaaagatgctcagtagtctttttctgaggcaaatttgagttcatgataaactctgtcagtataaatggaattttttaaggctatagatgttagtatctgtaggtatttggaacatcagtactagaatagaaaggaagttactggtagacaggagaagtcctttcaggtcccccacaaagaacagagccacagaactgttctacttatagtaattcatcaagtttactgcccttaaatttcactgtagtcatatcagctcttgcagcttatgttttgccttataaattacaagtaacaggtaaagcattgctgaccccttctagtttatgtcttagggaaccaactggtaatgagtattgttctcactgacatgaaagaaaagacttttctgtttgcttttctgctacaattctattataattttaccctagagcattttcctgtgattgtgatggatgtgatataataaacataatggaaaattctaaggccatcaaattactgattcaagatgggtaattaatactggagtgcatttgcatgggtgctgaggtgtctgtgtttacagtaggtttatgtgttctgtgctctgagtgatgttgtcatagtgctgtgtgtaaactgtgctgtgtcaggaattgggggtttggatggggctctctaatttgggtactatttatgttaaattttaaatgatgatgtagtatgggatactgtgatattttaagtgatcattgccttttctgctgtacaatatgacccttctcatctctctcattcattttgcatgcctctgctcacttctgtacagccacagttgaggctattgaggctgaaaaaggtatgatcagagtccttgtgctgggcagagatctgtggtgtgtgggtgggcatcagagaatgtcctgtgggtgtgttttactcctagcttttacagcccaagatgaatcagactcactgattcatcaagtttagaagccttgcagccctctttttttaatttttcatttttaaatcagaagggctgatgtctatggtgacagtctttttcttctttccggtgtaatatgcaatcagaaagtaatgtttctgatttctttagagtatagcatgttatgctatacagtatagctttataaagttgcctgttttaatggaaattgccaaactgacctgcaaatagagatctgttccatattttgcatgattctatgctactcagattttttttccctaagtgaatcctcctctaggtataggtgtgagtttgtttttacaaactagtgtgcctgactgagaatacaggaactgtcactataatgattttcttttttcttttttggccgcagtttgggctatagtttatggataagattatgttcatatatatatgtgttggcttggtatttcacattcctcagtgtttgtagccccagccatttgtttggttcatgtgccagactaagacctaaggattgcagatattaagcaaccagattataaccagtggtttgaaaatatttcctatgaacactttaataatggaggatgcatcattctagatgaagtgaatgagaaaccatacaattggtggagaattgccatttattttgatttgagtttccaaagactgtgcagtatggccaatgaattaaggagaacatcttctaaattacgagattataaatacttttttgctatcagccatacacagatctaactcttggaggcacttccacctttttaatgttatattggtggcgatgggctgaccttgacctccaagatagttctgatctactgtattttaacctttctttaactctttctcctcccaagctcttggtacagatttgtatattgaggattaaccttgtttagcctcctcacttgcccctactctcattgctgccttactgtgatagtcactggtgatcttagggactgatgtaggagataattggtatagtagaagtcagactgagaccctgagaccattgcctggaggttgattttgggggcaggagagggttaacattttttttgtatttttattttttggaaggctttgctaacacttgtcacctataaagctatgatgtttatatttaggtttaaacatttcacattttaaggaaagactgaaatgaggataggattcagttaaagtaagatttatgtgttgctacttacagctactaatttctttcttcttaaaaatcattaattatgtttttgaaatctcagaaatgtttttcaattactgacttatcaaatttgcattttattaagcaatacgaggattctctccaccacatagaatctgcagttttgaagaggcaaagggtttggataggatcaatgagagaatgccacctcggaaagatgctgtacagcaagatggtttcaattctctgaacaccgcacatgccactgagaaccacgggacgggcaaccatactgcccagtgacccactacttcccagggactctcacatctcgggccccaaatggacagatcacccgaggagctggaggggtcggccaagctgactgtaaatttcacagtctctctgaagaaaccattgtgcttctgagaccctagcccccttcctggatggaggcttgagggccctgggacatgtgctatctgataagattgggtcatcgctgccaaggtggagagcagtgagcaaggggcttggggcaatttccagtggagggcatccacacctccattttatgcttgtggttcacacatttaagtttacaaatcagatttcttttccccttcagtagaattagattttgtttttcaatcatgatttcaaatgcaatcctaagagctaatgtggacttttctttttccatgaaatgtctttaaaggatgaattagcatggtcttaaaatacatttctgaggttactagctgtattttgaattgtgagcaaaatgccgagaaacccagttggcatttatacaaaatgttgacctcaggtctatagttcttaaatgtggctaattctgtaacatagtcttggtattttttaattatgaatgcatatcctatttccaggcaggctctcttacttgaacacaaatccaaaaactaatttagagtcttttttgcccagatcttttaagacttacaccccagagatttaagaagaaaacctctaaatttcaaaattatgaagaattacagaattactcatttaaggtactttaaaagaagtttgtacattgtcaaagtaaattttaattcaaatcatgtctgtaaaacttgacgtattttgtgtatgcatgttttcattttgcaaatatttaatatatagacctatgatgtacaggtacgacatgtataggttacctagatgttatgagaaattttagtttattgtgagtactcaagttgcttagagagccaccagggtgatttgctgctggctttctatcatttttatgttttaatgcaaaggaaattttaaaatgttctggaagtgtttttgattaagcaatgcagcctagaagcaatggttctgttcaatcattcagatgttagtggaagcataaaagtcaagactgcatgttgaaacctttcttttgatagttactgaactgcttggttaaactaaatggaaccatgtgctaatttttcacaattattgacctgtattgattgccactgtagtttggtatttccctttactttggtggcctgcttccctcatgccctggaatacaactcagagctccaggcagcggaaccatctattgttttgtttgccagaaagtgcaccctgtatggtctcctgtctaagttggaaatattatgcatgtgcaggactattcgagtattttataaacagtagcacacaataaattccatgcatgggccgctgctcctatctctgtgttgggttttatttggaagatgcaatctgatttgtccttttgatgcaaatcagaaaatcctgttactagagctgggatgtcctccggagattatctcgtggatagttcatggtaatttgattaattaaattctttataaattttgccttaaaaaaaacttttgttatatacttgttttacatgagcattagtaactgagcactagaggactttgaatgcctactgtaggcctcctaagtctaatatttaagatcactgtttattgtcttttaattgaaagaaaatatgttattgtctagaattttgttatagtggtattgggaatttactgggtgttctaacaataagaaaaatattagtgataattgca

SEQ ID NO: 18 - DNA, 18529 bp, Homo sapiens
agtgtgaaatcttcagagaagaatttctctttagttctttgcaagaaggtagagataaaggtaagtcttggttttccttttagttagttttggttgttttgaaaacttttctcatcactatgttaaatgttactgcttctacaggatttatggttagttgcatttaacatgataagtcattcataaatctttctgtagaattacattggatatttatattttaggaatcacaaattacaatatttttgttctacttagttaacaaatacaagtaaaaataagataagtttgcttaatactggctcattgtactcttggtaagttaccatgagaaagaagggaagaatgtgctttccctctggtagccttaaaagaatgtgtttttcctttccttccccttgaaatatttcttcccaagagctgtgtgttttacagagaaatcgtgatgggggctgctttttgggggcaagaacaaaagtgataggagtgggctgcagggaactgtttcaaaatagtaggactttcataatttattttcttcttttgtaaggaaaacaagatagattcagacctcaaagtgctaatcatgctctttgtaataaacatttaaaaatatatgttatatttgcttatgctatttaaaataagaaggtccgcttattacttttttcatttaaagagggtgtggccacattccttttcttgtaggctctgtgtcatatacagtcttttcaagtgctggctggaaaacctaaaaagaagggaaatactttctgggtagtgtcagatacattatcctaggggaatgtcagtgaggccctccaacagctattccacttgattgttgcatgagctaatggccataaaactccttagaaaagcacaaagcaaaactaaagaagagtatttactagtgttggatatatttgtaaaagtgagattacaaatcatgtatctggctatttttttcttaaacatgttccttcaagaatttttctgttcgttcattttaaatatttattaaatgttctgatttcttatgttcactgctagctaattaacaaggatggaatttttcttgccttggttatatctaaaagattgtaaaaactttgagaaagcaatgttgccctctttccacaggagtattttggtagctgtaagagaatgcacattgcaaatgactcaaatgtggtaaaatgttggtttcataattctgaaatggcctcttccccaaaagtgacagtaacaccctagctccaggctcaaccacatccagcacatagccaacatttaacagatgttgacaaaatagttaataataatattattaaggaaccagccagagtttcatgcttattaaatactttttcaaccagaaggtctgcaaaggttgatttctgaatatgacgttagctctctctagacctattaatttacgacatttcaaatcagaggtaaaccagcagacctattatttttcaatgataaactataaacagttttttgaagtcaactatttccttttcctttaaaattggacagaatttcatcaggaagctcagaacaatccaatttatataatgccttccttcattatgctaattttcttcatcttcatctacttgaagtaatatttaagattggcacttcagagctgtaaatggatcttagatgataattacttcaacattcttattttataaacgaagaccctctggagaagctaaatgtttttcttgaggtcagatcgccagataatcaagaaccagtatacttcaatttgtattttatatcctatagttgtgggtagaaaatgttcattaaattagtgtagatatgttttttaaaatattagcaatgatacatgatattcattcaataatacttattaacatcctaaattccaggcattttgctagggattggaagtacatacataatgaatattattatttgtatgttagcacgggcctcatggcctgctcctggggaatataaacaagccaatggaaagtgataatacagaaaggtggggctggtgtaggggtgaagtcaggatgctttgggagagcatggaaggtcaccgaatccagtgctgaggaactaatgaagggtttctgaagaacgtgatgagatcaatgctgatgagtcacttagaagtagcaattagttaggcaaagggaagtgaatgtggaggaggaacaagcattccaggcaagaagaacaccctatcgaaaagcctggaagcaaaacattagtgaggctacctttcataaattgctttctgtaagtcatgccattgtgtagtcttaattgctttctctcaccagggaaggtgtgggaaggacttgtgaaatacatattcgaggaaaaactatgcacaaggccgtgcatttaaaaataaactccctaaggctggggtgaaacctgctacggtctgcgcaagttgactgttaatgaatttgattctcaggtgtgagtgattaaaagaacactgatcatgtcattttctttttggtcactaattccctccctcccttctctttcttttcttttttcttttcttttctttttctttctttcttcccgacagagtcttgttatgtcgcccaggatggagtgtagtggtacaatctcggctcactgcagcctccgcctcttcctgggttcaagtgattctcctgcctcagccttctgagtagatgggactacaggtgcacaccaccatgcctggctgatttttgtacttttggtagagacggggtttcgccatgctggccaggctggtcttgaactcctggcctcaagtaatctgcccaccttggcctcctaaattgctgggattgcaggtgtgagccaccatgcacagccaaaatatataacactttggaatcaaaagggatggatttatgtctccattcttgccactactagcaggaagactgcttgaaaatagcactcagttttcccagatagaaactgaggataatgattaaaggctattattccaagcaagggttagtcattgctgttactatcattgcaaaactctgatagttctagattgtaaccaggaagatacaatcaaccacaaaactcagcttcctctgtcacaaattctagatagaggtagcctttcatgaggctgagagatggaaaaatgaagcggggggactctcttaggacacataaatatgcaaaaaaattgctacgctttagaaagctatacattcaaatcatagataagctgacattagtaggcagtgcatgttcacaaaaagaccattaattagaagaaatgtgaaatattgttaatttccttatagatttgcctatgtataaatggccaatttcaccgtcaatgagctcatgctaagtactgaaataaacttagttttagagcttatctttggttagttgaaatctgtattgagttagttgaaatctataagttgatagaacaggctctttaaaatctattgcaagctttatacactacaaacaaaaagatagaaaaaagaaaacctttcatgaactcattggcttaggcaggttttcatgcagagtgtaggtattgaagagtcagaacggcttaaggatagaatttggccaatatataaaaaaatatatatttggtatttgttagttgtattataattattcagaagttcagttaatacgtgcagttggctttgagcccttaaccagctgtatgtgataaaatctgtttcctttagagcaatttcttatatcctgccttgatgctcctgtctttaatctttgctaagagctggtggtgaatttggctgaattcagattccgtttttctctaattgatttcttgaagaaaattctctattggttgcttttctttcctagattatgcttttagtctatccaaatacttcaggctagaatgtaggaacttagaagatacaaatcacaaagctgtctcctctagggatgctctctctttcaaataagtgacttaaacaacttatttttgttatcttgtgttatgtaattaatataccttttcctgggctttctctggctttttttttaaatggacattattcaagtattttttagaagtaaaaaaaaaacagtacagtaaagtttttataacgtttattttgaagttgtcagagacacctttaatattagactggacaatatctttagtctttcttttgctttcttttgaagtttttatttgctaattgaaaagaatggaataataataataataataataaataaataataataataaataatataaataaataaataaataaataaaataaataaataataaaaacatgtttttataagtgatggagtagtactttgccaagtgatgaattttaacactcattttgatgattcttccttatcaaagccttggatgaaatgatgaaaatggaaattttgagtgcctgaagctgctagaattgcttttaaagtattgggtgtgccaattaagaaggtggaatatgaaactccatgtggcaaccgcaattgcatgaaactagactgtaatgggaactaaaaccttgtgcaaaattgcgggttgttactttatcaggaagcaattttaagtctatcaattatatttaggaaacaggctgctttaaatgaatggaaaaagtattggttcttctcacagatgacagaatagtaataagagcaatcccatgcgaattaagtggggatgatttctgctttggatattattttcttcatgcattcagtgttattacttgcaactccagttactttttagcaggtgaaaatggaaagagtttgtctgaacatgctgttgaggaatcagtttatggaatcagtttatgcctcatgagtcatttatcttcatatcaagaatttaaaactgccaagattgtcctcccaacctctctcacaaacattcatgagagtagtctctagaggggtgaaacagaatggtgtagatagacagatcagtgtagaccttgagcaaggcctctgaaaaacatccccagactaaaaggatctgtgatggcattttgtgtgtgtgtggccaaaacagagaacacattaattttcaatatacttaagatcttaaaaatatatgtctcattaaataaaaatattgccaagtcatgatagcaattcaagaaatttcctttaagatagagtttgccaaaagaacatgcatgttacaattgcacctctaggcttcctgctacaacaaaaaaatccagtataaaataattcttttctgggttttttgtgttgggtgggaaaatatgtaggactactatttagacagctcaaataggaagaaatgtgaagatagcaattacttcaatgctgagtacttttatatcaagaaatagaaaaggaaactaaattattcagggagaaatatcacctggatatctttttacaattaaaattttaaatctgaattcacttgtacagattggcacaagttattttaccttataaatgtaatcattggctgggagtggtagctcacacctgtaattccagcactttgggaggccgaggcgggcagatcacttggggtcatgagttcaaaatcagcctagccaacatggtgaaaacctgtctctactaaaaatacaaaaattagccgggcgtggtggctggtgcctgtaatcccagctactcaggaggctgaggcaggagaattgcttgaacccaggagacggaggttgcagtgagtcgagatttcaccactgcactccagcctgggcgacagagaaagactccatctcaaaaaaaaaaaaaaaaaaaaaagcaatcattaagcttttcatctagccattacttttgtacaggctctcattaattccacatagatggtctaatggtctactaaatagtattctaatcctccatcttgtctatctcttagccattctccatgataaaggatgaatggtctttcggaaacataaatgaaaccatgctgctttaaaaaaacaaacaaacaaaaagaaacccattaatgttttcccaaagctttgtggacacattgaagcttcttgtttcagcttctgccaacatttctcgctccagcaaactttcttctgcttcccaaatatgacaagcttcttctttaacttttctgccaggttaatcttgactcatttcaagagaggcttgggtcagccagggcctactctaagaagtttctttagcccttatgttttcctatggagagcacacactagctttaagtcctgagggtacttaagatgatatttcaatgtttttgtactcttagtgcttggcatatggtgggtggtctacaaatttagaacaatgtagtgaaccacaaactcctctcttcagcctgtgtgcttacttgtagtagttgtctgatctctaaaatttagaactgaatatgccaagaaagagttcaatttcagagaggagggtatggtttcattttaagtataaaagcttcctttaaaaaaaattacgtcttacattttgttatgctcctaagtgtaattgatcctggaaagtaagcgcaaggctactctctaatgctaactcttatgtatgtaagaggtgaggaaggagaggttgtgtgtggtgcatttgttttgtaaaagcatctaactgttttctttccagacactttttcaaaaatggcaatggtatcagaattcctcaagcaggcctggtttattgaaaatgaagagcaggaatatgttgtaagtagagtgataataaaattatgattacaatattgaaataaaaacgaatataagtaaatggccattaatttatttctctctcattcttagcaaactgtgaagtcatccaaaggtggtcccggatcagcggtgagcccctatcctaccttcaatccatcctcggatgtcgctgccttgcataaggccataatggttaaaggtaacgtgtttcctcaaaacagttccctcctggacatttcagaatggctatttgaatgactgtcaaaaaacagacatgtgcaatggaaagaatctgtttcattttgaagataaaaacatttctttgccaaacgaagatgtaattatttacttaacactgaggaaattgtgttcacatcagtggaatctctattgttacagcagatattactggctcatttctagcagaaattccatgctgaaattaaaagctctgttcacatatagagttgcaactagtatcaaacactgcaacactgagggccaggaaaagttaattgtctcttcctttctcactcgaatgaaatgtcattctcccaagtgcttccttgatatgtagtatagcatcgattttttaggctgatatataatttatatttcttaatttgttaagaagttcttttggagcatctcagtaatgaattattttatgtcaattgatgatgaagaaaattggtgttaaaggctgttggccctttatttccaggtgtggatgaagcaaccatcattgacattctaactaagcgaaacaatgcacagcgtcaacagatcaaagcagcatatctccaggaaacaggaaaggtaagttagagtggtaaatttagatatttaatttcagcatagttatacttaaccatggattcggaagcacagttacctagttctttaaggttctaaccactgttttctcattacatctatgattgggattgcagtgtttatccactttgttgcaatttaatcaattttatcaaatttcctatttttatacattagtcatcttggtgtatattgtttgcagatgtggtgctctggggacaaatttttaatttgaacgtaaacatcgagattgctgctgtcaataaagaatatggtctgattgaaatgtactaatatttaaactgaactgtttaatgcctaaattttatatataattctactttaaaaataagccttatgtcttttataccaaatatgagtagttttctaaagcaatgaaattagaaaactatataatttcagtatctgattatactgcttgttatttgagaagtacaaacctcaaagattggaaacatgaatatattattttaaaagtaattttacttctgttttctgttagcacacagtcctctgtgttttgatctttgtgatttctcccctgtgtataagattactaaccctatgctttaagaagttattgatgaattcagtaaattttattttaatccctctagatctggaagggtaagataatgtttcaaaatatttggtacactttgtatgtgaagggaagaagctctaaaagatggttgggtttagggatgagttgtacgatgacctaaagtcaggtaatatcacattttttaacctagcatgttacttattggaagtcctgattctaatctttttttttgtagcccctggatgaaacactgaagaaagcccttacaggtcaccttgaggaggttgttttagctctgctaaaaactccagcgcaatttgatgctgatgaacttcgtgctgccatgaaggtaaatcgcccaatttgagcaaactcctttcctcaagaggatgtattgggcaagtcacttatgcttatgttattttcaaaatctagtatagtacctgtcaatcagtgggagtttgaagaataaataaattaatacctcaatgaaggaattaatatataaatgaaaacagaaatgttggcactaacaccttccatgtcatgtcactatatgagtcatatatttgcatttttatttttacccaaaatattgatgataaacttgttttgttttagggcaatgtaatagagcttattgtaattattaaatgttgtgggtgaaatttactaaatgacagagtcaaacaaattttggaacaccaaaaactcattgatcctcttgcatgaagatttttttctacatttatccttttcttctcttcaaatttagggccttggaactgatgaagatactctaattgagattttggcatcaagaactaacaaagaaatcagagacattaacagggtctacagagagggtaagttgtaatgtccaacagtccaaacgccttatttgaaaaggaaatctaatatactttcttaaaattgactgtctatggtaattatggcagctttggaatctccacatatcaaaatgtttctttattgtttggcacatgtctattaaatgctgttaccaggcaacgcttgagttgctaggttgctgacaagggagatggtgtcccaatccgcatcaagcttgcgttttaatagaaaatgttcctctaggataaatggccacatacgattataatggaaacctcaattcagagcattgaatttttaaaaatttctgaaaaacacttttctattattctggaatgtattttataaaaatgtcccaaggtcattttttttgaaaagaatatataataacaaaaaaatctcctaacaaaatgtttttcatttgtccttgaaaaagtaaagaattaggtgcttataattctctgttggaaaccttaactttatcgttatgaacataagagactcactttatctctagttaaattcacagaataaaagactagtcttagcttattttatctctccagtgaagcatctcatttaaatgatgtgctcaacactgaaaagagggtaattgcaagtctcttaccattttcctactctcatttccctgagctgctggctttttggctttcccaatgcaatatatggcatatagaagatctttctgcttgattctcataccaagcatggagaatacaatagcttttgcatatcattttcagaggaatttaataaaagaataaaaataaggaagcttttaaacctcattttctgcaattcttatttaattaccaatgtttatgttagatccatgtgtcagtggtaataatgatgattatttttgtttgataaaacatagtttataaaaataagtgtttatatatttttcatatggccaagatataggccagtgatagtttattacattgcccagtttcaagttgttttagtccgtttgtgttgctataaagaaatatctgagaccaagtaatgtaaaaagaaaggaaatactgtacaagtagtatgggaccagcgtctgcttttgatgagggcctcatactacttctactcatggcagaaagcagacagaagcagatgtgtgcagagagggagagagagaaaaggaggtgccaggctcttttcaacagccagttcttaaagaaactatgaatgagaactcactccgagccattcatgagggatctgcccccatcatccaaacatctcccaacaggccccaccttcaacagtggagaataaattgcaacatgagacttggcagggccaaacaaacaatatgaaaaccatagcactagtcaattataaattcaattattttttcctattacagtattattttatgtagttaagcagaagtgtttacacacacataaatcatcaaactgcattacttataagacatttatagtttttaaactaaataaataatttgcattcaagcaagtacctcattttgttcttttaaacaattattttattcattctattgcttaaattctgccatgttgtatttcagaattaattactaatgtatacctatacaatttattcttaacgaaagctttatgactgtgagttttcaatcacagtattatctaaattgctcccattgcttcatatgaaataaattcaatgatccaaaaatttacctgctttaatttttctcttcttatttaaaaatgataatattttgcaacatgttccataagtcattgaacactgtggcactgtgaattttcaaccaacttagagatgtcagatattcttattattattcatcactggtttactataaaatctatttttcttttttctcagaactgaagagagatctggccaaagacataacctcagacacatctggagattttcggaacgctttgctttctcttgctaaggtacaactcagatactttaggaaatgcctcttgttttataaagactaatttcttagtccattttgtgttgctataagggaatatctgaggctaggtaatttttaaagataaaaaggtttatttggctcaggattctgatggctaacaaattcaagtttgggtatctatgtctggtgagagcctcaggctgcttccactcctgacagaagaggaaagggagctggtgtgtgcagagaccacatggcaagaaaggaagcaagagagagaatggggaggtgccagcctcgttaacaaccagctctcgtggttctcatgagcaagaactcattcccagtgacggcattaatctcttcatgagagatcagccccaggacccaaatacctccctctaggccccacctttaacactggggatcaaatttcaacatgaggtttggaggggaagaacatctaaaaccatcgcaagtaaaatcttgtatctgagctccttctagaaatgagtaatagaatacctttttctcaaaaaatattatttatctgagtttaagataattaagtaaatcatgcaattacatgctagagaagagcttacaatagaatgggatttctttcagggtgaccgatctgaggactttggtgtgaatgaagacttggctgattcagatgccagggtaaggaagtgcttacaaaatactgctgcagttcatcttcctaccttaagtggggctaccacatgatcccctgtgaaagcaaatctaagatcttctgagagaccaatggcttcttaatgttcatttcctgaatgaggcatgtctttctgtagcccccacacacaaaaaagtagtctttgtaagttttcaatatctctcattattcgtaaaaccagagagaactgaagaaggacaatacaaatttgatttgtcattcccaagaattgtttgttaaaaaaaactctgacctttcgttgtactaggtataagaaggggaaatgtaatttttttattatgtgcaatggaaagagtaagcatatttaacgttatttttaacagagaactttggaatggtttatagatgtcaatttatattgtcaaaatattactgcaatgatataacaagagtataggataaattataataatatatgctttctaacatattgttttatttagtttcagtgacattgctgattatttatatgccaaaccactggcaacataagaaaaatcatatcattttaaagcctggaatttccatttaaaacaaacaaacaactaatatttgcattatgccttctcatggaacagtattctctagagaattcattacagtgcttcactaaggatagagatttctttgtgcacccccatccacttctgctataccagtacattatcatgtacataataggcactcatgaactttttgttcaacaaatgcatacatatcagatcaatttgcttgaaaaatgcaaaataatttttacatacattgaaggttttatcattttaatagaaattgttcaagcatattaaggaacaagagttagcatttgaataattgcccataataaaaaattcttatttgcttttgacatttctgaatttgctttccattttaagactatcagggttcttaatatatatttatggaggttacatggattagtgtgacccaagagaatgatggtagtcaacatttcaaagttaataaagaccgcttgtgacaatagggcagggattatatttttcatatataaaagaaaaaaatctgtcatttagtaaggttgatctatttgtctaagattatgcagctttgaaattgcagagtcagaatttgaatacagaaattctaacatcaaaatgcaaggtccaggttacggttgaattattgatttataagtaacatttgctgataattactttgaacaacacagagtaaaaaatctttagagatccccttggagttgtcttactatagagcataatcttaaagcaatttagttcagcaaacatttattctgcaaacatatattcagactctagtgtttacaaggcaccttgagagaaactgtggaagatatttgacaaacaaaataaggtccctatctttaaagaacttgcaatcttattgttgactactctgattgtattgggcacaaagcgattgcctatataatctttgacaaggtctaacattattgtgcagatatcatttcagcagatagtgaagtgtttacttttgtgtttcttgacaggccttgtatgaagcaggagaaaggagaaaggggacagacgtaaacgtgttcaataccatccttaccaccagaagctatccacaacttcgcagaggtaacaataaatttctttttctggaatctgtttatggaagatgcaattttcttttttgatgacaaataagagaaagtaaaaacagaaccctttttcaatatcactcctgtatcaaacagatacagtgttcctgacccattgttatttgtcaatttgtccaattttgtacagccgctactttatcatatttaatacattttgtgacttgggcatgtggaacataattttgttattttcactgcttttactcccctaaaagatttggaatatgtgtgggaaaagacatgcataacagaacaaatgaaattagaatgaagaaaaacaaaaaaaaaaaaacaaaaaaccctcagagctaaatgaagaaagaaatatgtaggtgctttggaaaaacaacaacaagacaaaactcagaaaaagtcctggcctttgagtgcaagatttagctctgggcctcttggaagtgaaggcgatggaaaagttatgacaattaccaaagttcaccatcttataatagtatactgatttctactgttaaatgtaagagaaatttagtgcacaggtctttatataagggaagatccatttgctgtggctcttagaactgctgtaggaagtgctatagttgtcaatcacatgccgtttctaataactgtcaacatttgcaaacatttcgccaaaatatataggaataccaaaatggccaggtaagttacattcctaggagaggatgaagtattcacgttatgattaattgggtatattgctttaaaaggtgtagccaaagttgttattctaaaaaattctttgagtcagttgccttgattttgctaaagctttctaaagaaaaggatgttttgcatgtatcttagtttgaatttaatattcagtgtttcagaaatacaccaagtacagtaagcatgacatgaacaaagttctggacctggagttgaaaggtgacattgagaaatgcctcacagctatcggtatgtagtccagcagttgaaagagttttctaactagaaattgtattttcaaagctatcctatacttaacaagaacaacagcaacaaaaccaataaaagaaaacaaaaaacaatcagaagtagtgcatctgtttcaattgaagcaacgtaaaagattggcaaagtactataaccttaataacaatagatattattccccttttcaaaaatagagagagatagactatacttattgagcacctacttatatcaaacaatgtaccaggctgggcacaccacagaggcaattcagaatggtcactgagagcatgggatctggaataaatgtaacatctggataaatgtaacttcaagtcctggtctactgcttgttaattgtacaatcttgggcaggtccaggagagtctgattcagtgggtccgagttggcctctaaaaatcggtactttttaaagatctcccaggttattcagacaaccatcagggttggggaacctatgttctcaagcagtgtttctcattcatgactatgcacttgaatcccctggaaagcttgttaaaatgcagattctgattccccaggtctggggtggagcttagattctgcttttctaacaagctccccattgatgccaatgctgttggtccatagatctcgacaagatgaagaacactatgaactggaatgtgctagtattatttgggttctgttttatatttaagcccatcctatcccagagttttttcttcatttattcatttatttttacttatttgtttgtgcaactcttactttagacacagaggtacatgtgcacgtttgttccatgggtgttctgcactcaggcagtgagcatagtacccaataagtagttttttgaccaatgccccttctctccctgccctctctagtagtctgcagtgtctgttgttcatagggtgttctttttaaatgttcttatagtaacataaataaagtatttacataggcttgaacacctagtggcttctccactcccaaggagaatatatgttggatagcgcaaactactgaagttgctcttgagatgtatttaaggtaataaaaaaattgatcgtcagggaaaagaatattcaaaaccaccatctagagagtcacaaataccttctcagaagttaactgccctatattgggagatgagaggtgaagaatgatgatgagggatagaacactgttggcaaaattctatatttcctgtttctttcatatggatatttcatttttttcatggtaaatacatcaactaaaattttcttctctaacagtgaagtgcgccacaagcaaaccagctttctttgcagagaagcttcatcaagccatgaaagtatgtaccattctacttatatgtcctgcttagaggaagaattatttgtagaaagaacagaaaacctcatgttgtttgaaaatctcacatttaatatcttcccattaatgagaatcattgttctatttgatgaaagaggtaatacactaccttctcagaataaacttctgttagattcggtgcttttttttacagatgagattgtaaagtgagcctgtaagtgatttacggctcacttgtgatttgcttaaaacatgtgtcaccacgggaagggtgatgtactttcttttttaacgtgtaattttagtggcctacttcctctaaggttgtgagttttataatctcccactttatgagtctgatttgttgtttttattattctgtcttttatgccacagattaatagttgaaacttttgaaatgtcattctatgattaaggatgtagaatgatgtatttgagatcaactatgtcactttaactttactgtctgacatgcatggtattatacaaggtacctcttctattctgacattttgagcccacaaatgaatagttatgaagttatcttccttttttctttgcagctccaaaataaggaggttttcagagagagagagaaagaaagatctaactatttgaataatatgaaggaatattttgaatatatatgaataatttgaataatatgaaatgatagacatgctaggtactgctctgtagtggttagcatagttgctgccccctttctgccatagtctagtgtgatatttcgttgggtaatgatgaatacctggtgccatggaagagaaaagtgggacatatactccagactttggaaatccaggtagcattgctgtcagctaaattaacacctgaagtttaaatagaaatgagccagatgagggcaagagtggaagagatggggataaagcaagggtggtccaagaggaagaagtaacccacacacaggcttgaaggcaaaaggtaacataaccttctcaagacagtaagtatagagtgatggtgcacactggaagagatggtagaattaggcaggatattgtaagccttgaaaaagaattaggcaggatatcggaagccctgattagattctatcctaagagcaacagaagatcactgacagtgttttaaatagatagactagtttattagatttgcagtttagaagttccctttttttgtaattattggacagtgtagagaccggatggtgagagatgagttaggaagttgtgacagctctctatacctaccgctaatgtagaggattatttattttcatttcattaccattcgtgtaaggtgtgtgtgtgtgtgtgtgtgtgtgtgtgtgtatagctagtttctctatagaaattatatggaagagtaagaaggcttcactttaaaattcatgtttttaatgagagtattttctgaatatgagacacttaccctcatttattttggccagggtgttggaactcgccataaggcattgatcaggattatggtttcccgttctgaaattgacatgaatgatatcaaagcattctatcagaagatgtatggtatctccctttgccaagccatcctggtatgttttgattcctctaatgccatcccaacaaatgaaagttctttttgcaagatcttcaaggagaagagttgacttattgtatctataaatttaatatgtaagattaatttaatatattatggtgtatacttcatgagtaaattgaactttcactggtaaaatctactagtgagttctctactgaaatactgggtacatttttcaactaaagtcatggaaacatttagtttcccatgcataaattcagcaagcagaatattctagtgttccccctagggtagatagacattgtggtttattttgccattaatatttgtcagaggattagaaactccttattcaaaatatttatcttaattctatcacatgtaaaatgtttaaaatttatgttcaaattgtctcataagaatgttaaaaaataagacaaagaacagtcaagggttttggacttactgaaaggtagataacgattcaaatttaattaattagtcatattggataactaaaatctacccagaaaatgtgagaaaattacaggcactatacatttctcttcttctggtgagtgaatcaggtatctcctcacataagatatgagattatattgtgttatacttatttaattttgtgtgatatttcattcatagaaaataatggcactaatataaaacataattaattcagaaaagtttgtaatctcagtcttgaaggctattgcttttttatgcaatgataaaaaatcagttatctgttgtatatattgtttaattaagtgaatggtaatgtgtaatctcatctacagctaagtctaaaaataattcttctataagtaaaaaaaaatagagaattatggtttcgactaacattaagtatacctttttttgaatcaacaggatgaaaccaaaggagattatgagaaaatcctggtggctctttgtggaggaaactaaacattcccttgatggtctcaagctatgatcagaagactttaattatatattttcatcctataagcttaaataggaaagtttcttcaacaggattacagtgtagctacctacatgctgaaaaatatagcctttaaatcatttttatattataactctgtataatagagataagtccattttttaaaaatgttttccccaaaccataaaaccctatacaagttgttctagtaacaatacatgagaaagatgtctatgtagctgaaaataaaatgacgtcacaagacaa

SEQ ID NO: 19 - DNA, 11080 bp, Homo sapiens
gacaatatcaggtgagctgtggaggtggggtccttggaagctggatgacagcagctggcaaggggataagagagcagtgagcccctccctcaaggaggtctggctttatccatagacagggccctctgaggtggggctgaggtacaaagggggattgagcagcccaggagaagagagatgggggttcccttcttctcttctctcagatgcatggtggacttaggaccttgctgggctgggggtctcactgcagagatgaagctgcttctggccctagcagggctcctggccattctggccacgccccagccctctgaaggtgctgctccaggtaacagttcccaaggtgggagaagatggtgtgttggggtggttgtgttccagagaccccttttctcagagcaggccttcctagctctggggcctgatagggggttggggcccattcctgactttgtgatccctgctctgggcagctgtcctgggggaggtggacacctcgttggtgctgagctccatggaggaggccaagcagctggtggacaaggcctacaaggagcggcgggaaaggtggggcacgaggcactgcccagctctgggcaaggatgtcccaggcctttcagagaagcagcaggcagcagggagcttgaaggtgggagagggggactatggggacccatgtggactccctttctgtctgtctgtccctgtgtttctggatgggagaacagcttaaaagccatccttcccaaagccttgcctctgtctggacacccaggtccatatcctttttataaaaggaagccttcctcccacccgtgggcctgcctgcatggtcctgcatgtctgcccctgggctggggctctgctgggtgggtctgtatcccttctctggccctcactcctcctttctccaagcagcatcaagcagcggcttcgcagcggctcagccagccccatggaactcctatcctacttcaagcagccggtggcagccaccaggacggcggtgagggccgctgactacctgcacgtggctctagacctgctggagaggaagctgcggtccctgtggcgaaggccattcaatgtcactggtactgttgcccatcacaccccaggtccctgctccactagtgactcctcctagggaccccagccgtctctcagtgatcccctcaacttcttcctccagggagtctcaggagtctccagggctcctcagcctcaggttgcctgggataggaagtgaggcggctcagctcccccattgttctttcccccggcagatgtgctgacgcccgcccagctgaatgtgttgtccaagtcaagcggctgcgcctaccaggacgtgggggtgacttgcccggagcaggacaaataccgcaccatcaccgggatgtgcaacaacaggtgcggctggctgggggtggctgcaggaaccgggctcagagaggcgtcccggacgccacaagcctcccggtgtcagcgccctgtcctcccctgcagacgcagccccacgctgggggcctccaaccgtgcctttgtgcgctggctgccggcggagtatgaggacggcttctctcttccctacggctggacgcccggggtcaagcgcaacggcttcccggtggctctggtgagcgccggcgggcagagggggcgaggcccggccacgcggtgcgcggacccaggcgccagctgatctccgtgtcccgcaggctcgcgcggtctccaacgagatcgtgcgcttccccactgatcagctgactccggaccaggagcgctcactcatgttcatgcaatggggccagctgttggaccacgacctcgacttcacccctgagccggccgcccgggcctccttcgtcactggcgtcaactgcgagaccagctgcgttcagcagccgccctgcttcccgctcaaggtggccctgcttcccgcccactgcctgggttgggagaggggagattgtttctggaaggggccatctcccttctgtgcccaggtttcctttcccagacgctgaggaaggctggccctgcctcccttgtgtccacagcactggctgctcagctatgacctgtctccttcctgcgcctgggctcagccagctggcagccagggccgtccatttgctcactgcctctggcaggccaagggagagagggttgttcctccttggctgacaggagtcctgttggtggaatcactggctctttgttaggttgggagagggttctgggaggagaccttctcagtgccccccaagcctccatgctcagtcctgtttccgccccactgagagggcagccccaacccccatcacacagaaagagagagcctgggggtctggtgggtgccgtgggacagggctgggagtgggcagggtggtcgaggcactgctgagtagggaaggaggaggagagaaaggagagagcgcctgagagagggagagacagacaggagaatgtcagggccagagggagagcaggcacagcagagagaaggggagagagacgggcgacgctttagtgaggagggatccgaggcctggcggtgcccagacccaggggttgcccaggttcccagttcagtgttctgctcattaaccctgcacctcagaggctgttgctgatggcgccctaggcagcgatccctttcgggcctccggaggcctctctgcaggttgagggtaccagaggtcctgagggcagggggagatccagttctgcctgggcaccttccttgccctcggtgagccagtctagcctctctctgtgcctcagatcccgcccaatgacccccgcatcaagaaccaagccgactgcatcccgttcttccgctcctgcccggcttgccccgggagcaacatcaccatccgcaaccagatcaacgcgctcacttccttcgtggacgccagcatggtgtacggcagcgaggagcccctggccaggaacctgcgcaacatgtccaaccagctggggctgctggccgtcaaccagcgcttccaagacaacggccgggccctgctgccctttgacaacctgcacgatgacccctgtctcctcaccaaccgctcagcgcgcatcccctgcttcctggcaggtcagctttggggtggggaccagaggtggcataggagatgttccctgttggagccacagtgagtctgtttgtgagcagcttgtgggtttgtacttagagagactgtcctcaccagccattactatcaacttcatgatattaatccagttgccttggtaacaagtcagatggagccagaaaagcagaaaagcaaacaacctctccaaccctaagatggagacccaggcatggctgaggagcctctgtccatcagtccattgctttctctgtcccttttttcccttctggactctggaagacaagagagtcaaatccctcaggggcagggaactaaaggacagagaacgctgtggtgccctcaccctctagagcgacactatccaatgtggtagccactagctgcatgtggctattttaattttagttattttaaattaaataaacccagtttctcagcggtgctaaccacatttcaaatgctcaattgccttacagtctagtggctccccctattgggtggcacagatgtaaaatattttcatcatctcggaaggttgagttggaccacactgctccaaaatatcccctcctgcgcatcttaattacccataataagagatgatgggattttaaatgtaaacaattggcagttttggagacacaattggggcagtgatggcagccatgaccagacattttccagtgttttttttttttctaagacggaatctcactctgtcacccaggcttgagtacagtggcacagtctcggctcactgcaacctctgccaactgggtttaagtgattcttctgcctcagcctcctgagtagctgggactacaggcgcctgccaccacacttggctaattttttgtatttttagtagagatggtgttttaccatgttggccaggctggtctcaaactcctgacctcatgatctgcccaccttaacctcccaaagtgctgggattacaggtgtgagccaccgcacgcagccattttccagtgtttttaaatgtaaacccaatagtggacctcaggccctttcctctggcctccctctgcctcctcctgatggttcctgctggtctctccctggctgggaccctgggaggaggatccaggtcggactttctgcaagagatgcccgacctcttctgggctagttaggcaagggcagccctccttagccagactcagctgcccacagcctggctttgatgagccccatgtcccaagcctgggtcattatgacctctagctgttcatggatggagatgctgctctcagagaatttcctttccaccagcttctagagctggcaaggactgaccctagtgtcctgaccctagccctctggcccctgcagagaagggttctgggaggactaggggaaccaggggggatctgcttagttttcttgaacagtctcaggtgtggactccacatatctcatgtcctagccctctcccctggggcaggctgcaccattggcatgtagtaaagggcagggctgacaactctgttcaaatggtagtggctttctggagtcctgtgttgagaaggattctgaggttgcatccaattttagcaggaaagagtgctgtgatcgttagctgcatcagacatgggcatggatgtaggctgtgccaacacgcatgcttcttcccagacactccttggaatcaagagaatcaatgaaccaagcagtgttcataagtctcatactttgtaccaggcactctgttaagccccatgtatccatatgtgtgctaggagggagggtaaaatataaaaaggcacaagccttggtcctgtgctcaaggagctcccagtttcaggtacaggaaagtggcatgtcatgtgttggaagtgatacctattgaatgagcatccccaaccagcagcggccctgagctgaggcagaagctatcattgtggactggggcatcagggaaggcctcctagaggagtgtaaattggggatagtttgaaaagatggatggggaggaggggtgagtaggaggcatttcaggccttggctggggagggggtttcagtggagcaaatcttttctgggatggaggccttaagaatgacagtggcttttgcctccccaaggggacacccgttccagtgagatgcccgagctcacctccatgcacaccctcttacttcgggagcacaaccggctggccacagagctcaagagcctgaaccctaggtgggatggggagaggctctaccaggaagcccggaagatcgtgggggccatggtccaggtaggccgtcttgaacaccgggcacacgggatccagatgtgtccctgcaacatcctagctgtgtgaccttgggcaagttcctaacgctcctgagccttgccttcttcatccatgaggctgtaaggattataatacatatatgaaaacacctttcagatagtaagtgcttgacaaagcctccttcccttccctctccttcttcgcaggtttgctccctgcagtcttctttcctgtgggtctgttattggtgttgggagggttgaatgtttggtttagcgcccaagtagctgttcagtaaattcttcttccctccatctcactgtcactcttagctcctttacccactcacctcttctttttaaaattaaaaaaattatagggctgggcgcggtggctcatgcctgtaatcccagcactttgggaggcggaggcgggtggatcacgaggtcaggagatcaagaccatgctggctaacacggtgaaaccccatctctactaaaaatacaaaaattagccgggcgtggtggcgggcacctgtagtcccagctacttgggaggctgaggcaggagaatggcgtgaacctgggaggcagagcttgcagtgagctgagatggcgctgctgcactccagcctgggtgacagagcgagactccatctcaaaataaataaataaataaaataaaatttaaaaattattattattattttatttttattttttgatacagggtcttaccctgttgcccaggctggagtgcagtggtgcgatcttggctcactgcaacctccacctttcaggctcaagccattctcccatctcagccttctgagtagctgggatttcaagcacgggccaccacgcccggctaatttttgtattttttgtagagacggggtttcgccacgttacccagtgtggtctcaaactcctgggctcaagtaatccgccctcctcgacctcccaaatccctgggattacaggcacgagtcactgtgttcagcccactcacctcttctttttggctctgtcataatccacccaatgtccttagcctcatttacccctggggcaatgttcctggttctgtctctcaacatctggtgcttcattgcccccaccctctccctcagaggcagaggcagacatacacacactcacacacacacacacacacacacacacacacacacactcctagattctggaggagagagttttcggtgctaagggtgagtttttgatttgcactaagaactcaagtgaaattcatttacactccaaaataacttctagactctagaatgtagagtgagactattccatgtcttcacttttcacagggaaaatcatgccagaatggcccttcgttccttcctgcctccctgctttccacaaacctaaactgagccttactgtgggcaggcacttggtgggcactgtgaagaatttcaacaacttcaatttcccttgctctcaaggactttataagatagttgcagaaatgagacattaataacttgaggacaaggaagttatcacaatgactaaaaaagtgatttgctatttagtcctctaaggcagagggcaatataattatccttaatgtacatttgaggaactcaggctcagagaggttaataattggtccaaggtcacccagccagcaagcagtagaactctatttatgcctctcagtgccactctgttaggcccaggtccggtattgtgggaggctattccctgaccatagagggatggaaggggtccccgaagccaagagcaggcagagactctggccctcctgtgctgccaggcggcatttgctgtggaggagtgggtggagaggccattccaaatgacttgtctttagatcatcacttaccgggactacctgcccctggtgctggggccaacggccatgaggaagtacctgcccacgtaccgttcctacaatgactcagtggacccacgcatcgccaacgtcttcaccaatgccttccgctacggccacaccctcatccaacccttcatgttccgcctggacaatcggtaccagcccatggaacccaacccccgtgtccccctcagcagggtcttttttgcctcctggagggtcgtgctggaaggtaagcaggacctaggccaggagcgagtgggctgacagctaaaggtggggtagggatcaccttggctctagggagctagggtggggagcagtctgctttcctcccatcttggagatctggtctgactctctagcctcagttcctctgactctgcttccatatctgataataaacagtggggtggggatggccctcagagggaactggctacttcctatgtgttgtggctcgctgtgacccaggaagccagggcctgggagcatcccaatcttgcaagtctgaatggcataatctcctgagacctatatgtccctggggtcatgtagtgaccggtgaggacctgctcactggggccaccaccttggcaccaggcactgcttgtgcccagccctcttctcgaatcctcctgaccctacctggacttgtccctgactccaatctgagctctgatactgagccagatacttcccctgacctggctcctctggtccccaggtggcattgaccccatcctccggggcctcatggccacccctgccaagctgaatcgtcagaaccaaattgcagtggatgagatccgggagcgattgtttgagcaggtcatgaggattgggctggacctgcctgctctgaacatgcagcgcagcagggaccacggcctcccaggtgaggggctgcaggagtctcccctgatgctcacctcccctgagctgcctcctaggtagcccatcaccccccttcccactctagggtccctgccctctccaaagcatattagaggcactttgctctcaggaagtagcctgaggccaggcccctgccttttcccggacccacctgataaatttccagctcctctcaacctcctttgcatgctgtaattctcatattaggggcatcgtcatcataatgataacccacagtctgaaaatctgtctctgtcatcattccattttgcttcattgtacgttaactctgggggaagagattattattgccttcattttactgatgaggaaactgaggcttgatgagattcagaacctggccaggttctctagccaagtcagtggcaaagctgaaatttgaagccagattagcctaacctcaaagcctgtgcctatgttatggggtagcccatgtggctgaggcttctagacacatttcacctctcatgggtcagagacagacacatcgggctgctctggagggggacaaggagatgtccctattcttggacccagcaggaactgtggcagtttagggtttgccttatggtaggagggcaagagaaagacagagagggtcccagagaggcccagttgtgccccttggtctaagccaaaggtacagggttccttgaggtgaggtccttccctccctctatgaccttggttgtgttgggaaggtgggttttctgggctgctggcgatatgtgaatcttccctgctgtctccagtgacctccccaccttgaagcagagagacctgcccatagccacctgtcccctcccccatgcaggatacaatgcctggaggcgcttctgtgggctcccgcagcctgaaactgtgggccagctgggcacggtgctgaggaacctgaaattggcgaggaaactgatggagcagtatggcacgcccaacaacatcgacatctggatgggcggcgtgtccgagcctctgaagcgcaaaggccgcgtgggcccactcctcgcctgcatcatcggtacccagttcaggaagctccgggatggtgatcggtgaggaggggcaggcgtcgtgggccgctgggtggctgtgggcccatccttgactctcttggagcccaaatttcctcctgtcagttgaaggactggagggagtcagtaattttccagtgtgttccaggaatcctccagatgccctggagtgcccctaatgtgccctgaacctgttgggggtgcagcaaggaaagacctggacccctggttgtaaagggtggaagatagaaaagtgccacccttagctacttcttcccatgggtttcactgtgccaccatgtgggtgtcagtcaccagtgggcagtcccctcccagctttcccacagctccccttagtgtcatttcctcgtggtcctgatgtcttcatgtctagttcttgcttagcctgtactgcacctttgggaaaattagaaaaaggtgcccctctctgggtgggcgaattataaaccacccccaagattctcttccactcctgtggatgcagctcctggccagggcacagggcttcaggagtgtgtgtgggcccgggtccccctccagcatggtgccctggaggccgccgggctaggggtaagggaaaggccactgggcagctgtgctttactctgcacgatgagtggagcatcacttgtgtgaaagcccctgggctgcccaagggcctggggccctcctgtgcttccaggtggcatttgttgtggctttgttatatcctgggagcagcacaagcccatcgatgccctgccagcccagaatatccttgggcacagtgtccatgggtgttccccatgcaggttttggtgggagaacgagggtgtgttcagcatgcagcagcgacaggccctggcccagatctcattgccccggatcatctgcgacaacacaggcatcaccaccgtgtctaagaacaacatcttcatgtccaactcatatccccgggactttgtcaactgcagtacacttcctgcattgaacctggcttcctggagggaagcctcctagaggccaggtaagggggtgcagcagtgaggggtatatctgggctggccagttggaaccacggagatctccttgccctagatgagcccagccctgttctgggtgcagctgagaaaatgagtgactagacgttcatttgtgtgctcatgtatgtgcgaagtatataaattggcttttcatgcgtgtgtgttgtctgaacatggggagtgtttcatgggttatgtgtatgtgccatttatgtgagtgtgtgtttgtgctgatgagaatactgagtatgtggaaggcagcagagcggactggtgaggagcacagctcaggaactagactgcctgggttccaatcctggctctgtggcttgctagctatgtgaccttgagcaaattaccctccttaaacaagagttttcttccttgtaaattacatctgtcatggtttcttggagggcccacttgtatcctctggttcttcatttattgagcacctactacatgcaaggcactgtactaggcgtgagaagcatatagaggcaagaaagagataccaagatgccatctgtgtcctggttagcagagctggaccagtggtgccttggagggataagccagctgcagctgggctgtgtggttgacttatgggcccagccagccaggctcaggccatggctcccctttttcttcctcaccctgatttcttgcttattcactgaagttctcctgaagaggaactgggcctgttgccctttctgtaccatttatttgctcccaatgtttatgataataaaggcaccgctgatggggacctcc

SEQ ID NO: 20 - DNA, 61593 bp, Homo sapiens
agtctggctgcggcggcagagctgaagtgagcggagccaccaggcatgtatgaccgcggccaggatggagaggcgcgccgcgtgcgggcgctgcggggtgggggtcggggggcggtctccggccgcaggccacacggaactaggggctgcgccgcgccccctcctgccctcgctcgagaggacagcacctccctgcacgcccgagactgcggaactggacgggcggtgcccggggtgtgggcaggaaaggccgctggggaggcgcggctgaccgcagggctccgggcggggggctgcaaccggggcggcccgtggagaagccagtgggggcggggcgcggcggccccctcctcggtgtccgctgcctcctccttagcccttggcctgagggcggaggcacagagcccacattgtgcccccgcgccagcccaccccctccgagacagagccccattcacctcccgcacgccagtgctcttggggacgggggctggggagtgtgcgcgcgtgggtatgcgtgcgtcctggttgcgtccgcggtgccggtgtacgcgcccccactgtgggccgctggagctgcggcccgggctccctcccggcctcgctgcagcagagctcccgcggcccacgccgctgcggctgcagctatttataggccttcgctgcggagatcgaggtgggactgcgggctgaggtggggtggcgtgatggggagtcctagaggtcgagagagcttggaggtggactgccggtgtccaggggaagggcttgggtgtccttccctgatgacccggtgagtggagggggcggtggtcagctttccttgatggcctcgcctgcctgcgattagagggttagaggcgggtccagtttgggatggaggcagtggaggccggcatctgagtgaaggtagtcaccccttccccttccatttgacagagtggaaggtggtctgtcgtgtgccggttgagcccctgggtgacagagtaggtgggtggggtgtgggtgactaagagaggagagtggcagtcagtgtgtgggagtgggggtggccagggtggtcagtgtcctggtgatggactggagggtaaggccagtggctggggggtcactgtgtaggtatctgaggagtgcgcgggagggggcaaggcagtcatggatggagagagggtaagtcagtgcctggggccagagcatgggggtcaatatgtgggtacagcagagtgcaggaggggtgtgggtgccagtgtccaggcgagaggctgggtggggagagttcagtgtctaggttaagaaggtggtgggtgggtcggcgtgcagagtccactcctgaacaggcagagatgtgacccctcctgctccccttccaggaggccatgtcgggtgaggacgctgaggtccgggcagtctctgaagatgtctccaatggaagcagtggctcgcccagccctggggacacactgccctggaaccttgggaaaacgcagcggagccggcgcagcgggggtggcgctgggagcaacgggagtgtcctggacccagctgagcgggcggtcattcgcatcgcaggtaactgcgcagggccttgcctgtgcacctccttggcacgcgaggttgactgagttcccgctgcgtgctaggcgctggagcggggactgggtgggggaggcctagggggatctgcgggtcacggagggcctcgcgcgtcccaggtgagtgcaggcggcacagcgccacctgccggccgcgcccaggcggttcatgaggcctggggttgggcttcttgccgcggcgtccatccttgattttaacacggtccagtgcccagatgcaacaaggataattttttgggttccccaccaggccctcggtcttggctgccacaatggcggccaggtgggaatgtacaggagcagtgtatagggagggggtacctggttgtctggagccccagcctcttcctgagccaggatctggccttgctttccagtagctccccatccagggagaacgatgggaagcatccagcgagatgcttggggaagggggagggcaggagggaagtgggtgacctagagctgtgctaggagagggaggagcagtagctctctaggctttggcttgagagtcctgacctgttccagccggagggcagggaggcccctgcgggaggccaggagagggctgcaaggccaggtgctgagccctggggggatgttgcagacgacgggaagcggggctggtaggagcaggaaagagggaaggagagggtcactgctgtgcacccagctccagccccagggtctggttccatctgcatgaccttcagggcttttcacagcacacacggactttaaagaaagaagtcactttcttcccacttgaaagggaatcacttgtgtcgttcccacgcctgggctttcttcagcatcacctttacagttgtggaggagtgtggggggtcccgaggccccggctgaccgtggttgccttcggtactcactgcaaaggctttgcccccagccagcaccttccgcgccggggctctgcgtcctctgacggtttccttaggaccgattcctggaagcgggacttgcagttacaggacatatggcattaagcttggagaaaacacggccaggggcatcccagacagggtggccgacattggtgaaggcggggagagcgggggctttgccaatctgatgggtggaaagagttgttttaattatcaccaagcattttttccttctgtgaatgggctattccagtcctcgtatgtgtacttaatttttcttgtgtgtagtgttttaagggttctttataccgactcagtcgtctccaatgttgcaatgggaaagttctcagctgcacgcaggaagcaaggtggggggcgggcaggggagcgtctcggaggcaggtcgccggcccggcggggaacagacaggtcgcggccgcccctgggcgggggccacccgaggacccccgggcgaccgcggtgtcggcggccgcgacccgggcgagaacgggaaagggcgtgcgtgcgggactcggagcccgcggaaccggcccgccgggaggggcccagacgcggctccctctgcccggccgcggcggccccggccccgccccgcccgtggggcatcctgggtgcgggggcggggcgggggcggggcgggggcggcctctttaagcggcgcgcgcggccgcggggacagagtggccgccgggtgctggaggctccgctgcaccccgcgccccgcgcccgccggcatggccggcccgctgcccgacgagcaggacttcatccaggcctacgaggaggtgcgcgagaagtacaaaggtacggccccccgtcccgctgcctgtcgggccgctcctgacagcccagccgccgagcaccttgtcgtccacggtggcggtcccgatcgccggcccgagcgcggccactccgccggcctcgtccgcctggatcgcccccaacggctgccagtgcctagggaaggggaggactcgctccgctgagcccccgaggccatgcccttaatagggcatcgcgcggctcgggtgggtggggtgggccgcgggcgggtgggggcgctcagggcttgtcggggtcggctgtctgagccaggatccggtgtctgtggccagcagacacatgggtcaaggctgagccatcccctgccccacctctggggcgcgtctgcatggaacaggggcagctccgccgcctggcaatgggtcacatagttgccgcctctcctcacctccctaaactggcgagggcctgggctgccacccttccttggcagggcaccccccccacaccccttctctgttcactaggggacagctgtgggctaggggtcagggtggcccctccttcctctctaggggagcatcagagtggcctgcccacctgcttgatgcctcggcagacccccttgccctagtccacgcccacggggagcccctggaccctcccaggtcctggtcccaccggccattcttgcagcccagctgcctggctcagcctgggtcgcccggctccaggcggttgtggacacagcattggctgccggcctgcagaggcttaggagcaagggactgagctgctggggagggtcgcggtgggggcccccaggcagagccgatcagagcagactccagctccacgtggctggttttgctggctctgcccccaagggcagctcagggagagaggtcctgctggggccccgtggtgccgctctccaccacaaccttgcccagctgggtaggtttcatggtgccccgaactcatctccttcaggcgtcctccagcgacggctctggggcagggtggatgtactgctgtggctctctttgacagtgctgtgcccagccgctttgcctgtgtgactagttcattcgggccaggggagacactcctgcacccttggggaggcctggagcgggcagcctgttgctcatgctctacatggccggccctgccttagagggagcacccggaggggtgctggggtatagggcagggaagcagccgcccacctgggctccagccctcctggcaagccccaggacagagctgtttctgagctgaccactctgttcaaagtgcgggaactgtgcaggatcgtttcctcctggagttcttcatctggtcaggttgctgggctgcctggggtgccccagcctgttctgggcattgtgctgaggctttcctggccccagggctgtctttcctctacctcctggggtgggaactacttctgattcatccaggggtgagccagacagatccctggaggttgctgggaccctctgtcagggtcctccctcccaagcgcagctcctctggaggccaggattggtgttgggcacactcgcagtcttggcccattgtctgccttctgggcttggtggtggaggctggtgagggggcaggggggccggggggcttgcctgaagtggagttgtcacgtgatggtgcagctgcccgcatgtgtgtggcactggcctgagagtggctaaacagcaaggcaggtgctgaggctccgtgagcacaccaggtaccccaagtctccttagctcctggcttgagacaaggggacgggaggggctgggctggtacctgtgtctgggagccacggaccaaggctgaggagggcctgcaggaggtcagaggtggcccctgtgccctacacctttccaggcctgacctctgtgagccccttggacctgctagagggctggagccccggcccttcctgtccctggggtggagggactgtgggagggcatggcaccccttgccagccagccagtgacggcaaggcagccccaaatccctccatggtaagcagctgcgggcccctgtcctgggcccagctcagcatttggtggttctgaggagggcagggaggccaggcctgtgccccctgcccagctgatccctgcactgaggaggtgctctggcttaggcctcctggcctcctcccctctgtggcattgcctcggttccacctcactgtgccctctcacagacaactccctgtctgaccctcactccggtgaccttcaccccccaccccacaacgtctcagaccctcccctggacacgtcattccctggctctcccctggaaatccccggtcttccctgtacagtcaggcggccactgctccgcttggaacatcgccaacttcctgtctgcctgagcccctcagcccccccattctccctgtcccccatccagggcagattcctctggggctgaggctactgcagcctgtggcgggagagctctgggcaccctgtgggagaggcctccgtgctgagggctgtgggctggtgacttagacagtcggcccagctgccaagaggtgtccagtcgcccagcgccccaagcctggcctgtgacagctcatagaggctgggccgttctgccgcaccatgggagcctggagagagacctggggtgggtgtggcagggcggggacagttctaggagagagttgtggcaatgcaggtgagtggaggtgaggcggccagtccataactgaaaagagagcggtgttgccaggggctgggtgagaaaatatcctggaattgacagctacacaactccgaatctactgaaaccactgaattggacgctttgaatgggtgaatggtgtggcatgtgaattacctctcaataaagctattaaaaaatactaataatcagcatgaggtcaacctaattggtactgacatgaaaagccagtggctccagaggaaatctcagtctgagctccctgtaaaggggcggccaaatccgtgtgctctctcccgccctctctcatgcacagcgatcgccccagccgggagcctgaacccagaggtgtgactctccccgtttttctttgtatacttccaccctgcttgattttttttttttttggagcgttttacttttgacagtaaacaccgaccaaaattcctctccagtgagccccaaataacctccagcctgccctctgccagctgagcaccaaccactgcagatgacgccctacgccatcacccactcacccgtgcaaacaccctgcagtgctggctgagggcctggggccagtgccagggacacagataaccaagctcagagtccaggacaggggagagtaggggacacatgaggagggggccaggcacagtggcactgggcaggcccagggctggcaaggggtcctgaagagagtgcaggccacaggctgggcacacgccctgtggagacccaacacacccagcccctctccaggcccgcttttcccccagaccaatgcaggcctcccacccctggcccctgccccacaccaacgccacccactcaccaacggtactcaccccggcctcattctcacccctgctgccctctccaggaccacctcacagcacccctaagccccactcccatccctaacatgacaacctaaagtctctatccccagctgcccaggcccccggctggccccactccccactccccggcctgcactcatgccctgacccccaggacaggcccctgcccacaacgctggactgctgctgggccgctctttctttcttcactgaccgcctcacctccactcacctgcattgccacaactctctcctagaactgtccccgccctgccacacccaccccaggtctctctccaggctcccatggtgtggcaggacggcccagcctctatgagctgtcacaggccaggcttggggggctgggcgactggacacctcttggcagctgggccgactgtctaagtcaccagcccacagccctcagcacggaggcctctcccatagggtgcccagagctctcctgccacaggctgcagtagcctcagccccagaggaatctgccctggatgggggacagggagaatgggggggctgaggggctcaggcagacaggaatggttatggattggcctgtactggccctgggtctggcctcttcgacttgccgggacgctgtcagggctgctcacatcgccgcgccatcagcacctcaccctccccccgctggagtcggttccgtggtgtggaagtgcccacttttgcttatgcgtttatcagttgacggatagtgggttgtttccaccttttggctgttatgagtgaggctgctatggacgtttgcatacacgtttttgtgtggtcgtatgttttttatttctgctgggtagatacctaggagtggaattgctcagctgtgtggtaattctatatttaaccattttgaagaactgccagattgcttcctaaagcgggcgtgccattctgcatgcccagtaacagccgggtgcgaggtttccaatttcctcacatcctcaccaacacttgttattatctgactctttgattgcagacatccaatcctagtgggtgtcgagtggaatctcattgtggtttgatttgcatttcctgatggctaatgacgttgaacactttggtgtgattgttggccattttttatatcttttgagaaatgtgtatttcaatcctttgtccattttagaatttaccttttggtatttttgagttgtaagtgttctttatatattctagatgccagtcctttatcagaaatatgatttgcaaacattttctgtttctgtggtctgcctttttatttgcttgctggtgtcttttttttttttttttttgagatggagttttgctctgtcacccaggctggagcaggttcaagtgactcttgtacctcaggctcccgagtagctgggactacaggcgtctgccaccacacctggctaatttttgtatttttagtagagatggggcttcgccatattggccaggctggtctcaaactcctggcctcagcctccacagtgctgggattacagcgtgagccacctcacctggccggtggtgtcctttgaagcacgtacattttaattttaattattatgactccagtttatctatctttttccttggttgcttgtgcttttggtgccatatttaagaagccattgtctaatccaagtcatgaagctttacaccaatgttttcttttcttcctttttttttttttgagacgaagtctcgctctgtctcgctctgtcacccaggctggagtgcagtggcatgatctcagctcattgcaacctctgcctcctgggttcaagcaattctcctgcctctgtccgccgagtagctgggattacatgtgtgcgccaccacacctggctaatttttgtatttttagtagagatagggtttccccatgttggccaggctggtcttgaactcctgacctcaagtaagccacctgcctcagcctcagtgctggggttacaggtgtgagccaccgcgcctggcctgaattctttgattattaattaagctgagcacatctcctagagttgttgactatttgcaccttttcttttgtgaactgcctattcacaagcattgttggccaggctggtcttaaactcctgtgctcacatggaaatggaatcaagggatcctcctgccttggcctcccaaagtactgggattacaggtgtgagctgctgccatgcctggctactacacctttttacatcagggacttgagcatctgtggattctggtatccatggggagtccagaacccatctcccgctgataccgagggacacttgtattcggcgtaaacttcgaagttgcctgtgggcagcaccagctcacggaacagaacttttcagctcctggaaagttcctgctgagtccccactgggcacaccatggatgggtctcacaccacgcatctatttttgtttaattctgtctgtttctttttttttttttttttttttttttttgagatggagtctcgctctgttgcccaggctggaatgcagtggcgcgatctcggctcactgcaacctccgcctcccgggttcaagccattctcctgcctcaggctcccgagtagctgggactacaggcgcccgccaccatgcccagctaattttttgtatttttagtagagacggggtttcaccgtgttagccaggacagtctcgatctcctgacctcgtgatctgcccacctcggcctcccaaagtgctgggattacaggcgtgagccaccgcgcctggcctaattctgtctgtggtttctttagccatatcaatttttaacactcaccagtcttttatgatttctggattttatgctatgcttaaaatggccttcttttagaaaaacatctgctgagagttgcttccagcactgctgcatttttttaaacatctctgtcgttaatctttgtggaatttgcttggggctgaggtcgagatgttcaaggaggctcgatgtcatgcttggtgtcacgctcatagggtctggccgtgggcttgtgggttacagggatgattgtaaacatctccccttccaccaatccggcttcctgacgcaggggctgtgtattgcttcacttctgtgcccccgagccgagccctgccctgtcctgtggcagaatccagcttcctgacgcggggactatgtgttgcttcacttttgtacccccccagccgagccccgccctgtcctgtggcaggtgtggcttgaaacaagcgttgggtgggagggataggtggacttggagctggctggacccctgcaagatcctggcctggtgcctcccaaggagcggctgaggagtcccccgtggtggctgtggaggtagagagcagcctggggtggagaggatgtgcctgcggcagagagggcggaagagccagcgcttagccttgggtgcataaaatcagagatgcctgtgagataggtatgcgtgtgcagacactgaggtgcaggaaatgctgggctgaggtggggaggccaggctgggaggccatcactagggcaggcctcgggccagagctctgagcctggggtcctccagagcttaggtgcctatgagaagaggcagccgggaagcagagcagtgggcagctgtgcagccatgggggcctgttgggtctgcgaaggaggaaggggcgtgaggaagcagggccacgttgggagcagggtgaggcctggatggtgctgggaccaggtgatgaggggtgttgggacctcagcgggactgcttggggtgtcgtcggattggaggtgccagggggcatgtgggaagtgctcaggaggccctgctggtgccaggctatggtgggtccagcagggtggcagggagggagaaccctctccaggacagagcggtgacatggaggctaggccgcagcaggtcacagcctcagctggatgctggcccgagttccctggggaaggagttccctgggccttggcctgagggacctgcatggtcacagggggcatgggcatcacctggcccagggtgagtactgagtggtcgctcacatttacccagccacacatcatcagtggccagtccagactgctgctcaccactgagggccctggagattttcccagggttgggctgttgggagggtgtgggcagtggtgccctgtggcctcagtttccccagtgaggcccaagaggagctggcagcagaggggccaggggccaggtacctcaagaagggactggaggaggctgggaagggcgatgctagtgggaccaggtgcccagatctcccaccgctggggtcatgggtgatgcccacagacccacagtgggtagggagatgcggggctgggagagcaggggccgtgggtcatgaggtcagggacccaaaatggggcatgggccgggtcatctgtaggcccagtggaaggggagttgggaacacgcgttcagacggtggaaggagggtgccagctgggaagacaggatcctgtaggacttgggacatcagcctgtggggcctgctctccaggatttgggtcctggttagctgcagaagagtcctcccagctggtggtcagctcttggcaggactgttgctgcttcttcctggaggcagaggagacccaggaccaggaatgggatggggatcactttgtgtccctgtgtggctccaggagtagcggcagacccagggccagtgctgcaggaaaggaaggccccaggacggcatcagggtggctggtgtgagtctgggtgctcttgggcaggctggtgtgtcaggtgggctggggccaagtgggacggtgagggtggggaaggccatccacaggggcacaccagggtgggcgggggggtgggggttggttgggggagtggggctggtcagggctggaagtgtgggtctgcaggagcagaaggaggtagctgcagtaaaggtctctggttgtggcttttatgatttttattctgctctgtttttcaaatgaatgtgtcttttgaccttttgaaagtgcatctctttctcttctttcttgctaaacgagtggctacctgggaagctaacagagcaggcacaggataggcctaagagacacagctggacgccactgtcatgactgccacaagaatgcatggttgtttacagaatacagatacccccagagaatgtgccctgttttaggttcctgtggctgctgtcacacgtacccacaaactgggtggccttaaacaacagaaatgtattctcttacggttctggaggccacatgtccaaaatcaagatgttgacagggccacgctccttcggaggctccagggcggactctgttcctggcctctccagctcctggtggccatcggtgcctgggctcgtggccgcatcactccagtgtcggcctccatcctcccgtggccctctcccctgtggcttctcttccatctcttgtaagacacttggcattggttctaggccccctactgggtaatctaggatgatctcatctcaagatccttgtgttaattacacctgcaaagaccctttttccaaataagataccaattatgggttccagggaattgttcatagacatatcttttggggacctccattcaacccactacagtctgtcctctggtccctcaaaacttacatctgccccacttccaaaataaatgtttcttatgccaacatgccccaaagtctcaacctattgtagcatcagctctaagtctaaaattccatccgcttagccaggcacagtggctcacgcctgtaatcccagcactttgggaggcctgtgggtggatcacctgagatcaggagaccagcctggccaacatggtgaagccttgtctctactaaaaatacaaaaatcagccagtcatggtagtacacaccaataatcccagctactcaggtgtatgaggcacgagacttgcttgaacccgagaggcagaggtttcagtgggccgagactgcaccaatgcactccagcctgggtgacagagcaagactccatctcaaaaaaaaaaaaaaaaaaaaattagccaggtgtggtggcacatggctgtagtcccagctgctcaggaggtggaggtaggaggattgcttaaccctggaggctgaacccaggtgacagaatgagaccccatcttgaaaaaaacaagaacaacatttaatcagctcagaagtcccaaatctgatcatcgaagttgtgtctaaatcaggtgttggtgaggctctgggtaggatccagatgggggcaaaatttttctccatctttttacttgtaaaactagaaagcaagttttatgcctccaaactgcaatgttgggctaggcatagactagacatcaccattcccaaagggagaaatataaaggaataaaggggttgccagtcccaagcaagtctgaaatccagcagggcaaattccgtggggtttcaaggcccgtgaatgctcttctgtggctcagtgccccaccctctgcacctgcacctctgccagcctctgcctctaggcctaaggccctgaccttggagtcattcttcctttttctcaaagggtagcacatgtttgcagctgcctgggtctgtcatcctgtttcttgcctgtagactctcagaagcccaataccttccttcatttcatcctgtctctgttcccatcaatccaagcaggcagtgtttctgctggtaaaacattctcataaaccttctgggtctcccctgtatgtcacagggagccaggccattagagagaagggttcactcggatcctccctggataatcttgtctctattcctggcttctgttgagatgagtgaatggacccatgagtcacatacctcatctctgcagagatggctttctctgcagaacacactttcctaacagtgaacctcccaacatgagcatcttttgcaatctaaataggctgcagatatcccaaatcacccatgctgtttcctttttgcttaatagttccttcctcaatttatctctttcttcctgtactttaccataagcagcaagaagcagccaagccacaccttccacactttgcttggaaatcttttcagctaaatatccaagttcattgcttacaagttctgttgagcacccgacagtgaacacagttcggcgaagtttcgcttcaatgtgagaagcacctttcctccactttcctcgttgccttctaaggcttcaccacaagcacctttaatacccatatttctaccaaccgtctggtcagacaggctaggctttttctactgtgtgcctcaagatgtcccagcttctgtttattacccaattgcaaagccacatccacattttcagatattcgtcacagaggcaccctgctcctgctcgctgtctgtattgatttcctttgattcccacagggaagagccacaggcagggcgccctaaaacaatagaaatttatcttttgattgttccggaggccagaagttaaaaatccggtgtcggcaggtccacgctttctccgaaggcacccgggaagagcctaggaatagccgcctgcctcttccaactccactgccccttggcttgtggctgcatcatgccaatccctgcctctgtgtctctcctcgtctaaggacacttgcttttggatctagggcccatccaggtaatccaagatgatctcatctcaagatcctttatttaattatatctgcagagaccctgtttacaaataaggccacatttatgagctccagggacatggacatagatttttttgtggccaccattggacctacccagccatcctgcagtagttggttaatgtagaacttacacatttttgttccatagtcattgttttaaaaagcgtgcacagtgggctgggcacgtgattacaggtggcacatgcctgtaatcccagcactttgggagcctgaggtgggaggatctcttgagcccagaatgtcaacactgcagtgaacctgggctacaagagcaagaccctgtctcaaaaagaataaaaaaataaaaaagcatgcacagtgttctttagtgtgtgttaatttatctgtaatttcatgatttaatgttatgaagtattttagacataagtaacttcttttacttagtgatacagcttgggcatctctctgtgacattaatttacaatacagcattcccctgtatggaaaccatatcatatttaaccaatcaatcctttctcctaggacacggagtttaattttggatttttgtattagaaatgactgcagtgaacagtgttgtagctgggtcattgtgcatctctatgactgttgttaaaaagggaatttctggccaggtgcggtggctcacgcctgtaatcccaacactttggggggccgagttgggcagatcacgaggtcaggagtacgagaccagcctaaccaacatggtgaaacgctgtctctactaaaaatacaaaaattagcagggtgtggtggtgcacgcctgtaatccccgctacgcaggaggctgaggcaggagaatcacttgaacctgggaggcggaggttgcagtgagctgagatcgcgccattgcactccagcctgggcgacagggcaagactctgtctcaaaaaaaaaaaaaggaatttctgggtcaagtggttttcaaaatttaagctttaatttacatcaagatactgttttttacctatcgtattggcaaaaatcaaaaatctggatttctaggttctgttgctgaagctgtgggaaccaggccagagaaagcgtctgtcagagccacaaacgcgcagtgtgtgtccgagcagacgatggtcactggcctgagtgcgctcagaggctgggcccacacgtgccgctctgcatggccagacgtgggtcacggtccccgtgcagagcgggaggcctccagctgtggggtgggtgggaaagcaggggcagaatggtgcccggaagatttcaccgtttgtgttaaaaggaagaaaaccaagaatcacatggtatttgcttgattttctgtaaagaaattctggagaaacaaacaggaagccactaacagtgattttcacactgtgtgtgtgggtggggggagacagggagaagggaggggagcaagacttctctgtctactctcagtgtttgagtcacgtgaatattttctattccaacacgattttgatttttaaagtttagtgaagggaagaatgtaaactgttataagttctttttttttttcttgagacagagtcttgctttatcacccaggctggagtgcagagatgcagtctcagctcactgcaacctccgcctcccgggttagagggattctcctgcctcagcctcctgagtagctgggattacaggcacccgccaccacacccggctaatttttgtatttttagtagagacggggtttcaccttgttggccaggctggtctcgaacttctgacctcaggtgatccgcccgccttgacctcccaaagtgctgaattacaggcatgagccactgggcttggcctaagtttttattttattttattgtttattttattattattattattattatttgagacggagtttcgctcttgttgcccaggctggagtacaatggcatgatctcggctcactgcaacctccgccctccgagttcaagcgattcttctgcttcagcctcacaagtagctgggattacaggcatgcaccaccatgcccagctaattttgtatttttagtagagacagggtttctccatgttggtcaggctggtctcgaactcccaacttcaggtgatctgcctgcctcggcctcccaaagtgctgggattacaggcgtgagccaccgcgtgcctggccagttcttttttattttttttgagacggagtctcactctgtcgcccaagctggagtgtagtggcatgatctcagctcaatgcaacctccacttctcctgcctcagcctcctgagtagctgggactacaggcgcccgccaccacacccggctaatattttgtatttttagtagagatggggtttcactgtgttagccaggatggtctcaatctcctgacctcgtgatctgcccgccttggcctcccacagtgctgggattacaggcgtgagccaccacaccaggtttcagacacaatttttaaacaatttctaagttgctggctaggtactgcagtcgtcgtccctccagcagtgcccaagtgggccgactcctcccacctgcccagcacccggtgttggagcttcagacaagtcacatggcctcgctgtctgacgggaacttgtgtaaggagtctcctggcagagccagcgggagggtgagcagaactgcggccgcgtcaggttagcgcggcatctgccacctgggcctctgcatcccggaccccgagcctggtcctggagccatcctggagccggggcgttccctgcatcagctctgaccgatcgtcagttatcttattccagcacgttttgtgctgatgaagagtttttcctgctgtattttcctaacttgttattactggcctaaagaaatctctcgggtcttttaactgcgtttgaagccagcctctcaatgaactttctctgagctccagtaaatggtgagttgagttgtttcaggtgccaagaggagcagtgctgacttgggtaaatgctgtcccatgtcctggcgctggaccgagagctgcgcctgcaccgtccgcattcaccctcacacgccctcccctcagcagcctcgcctcacactgggagggtgccccgctgtgctacaagggtcatttatttgcatgttaacgatgtaagctcattccttgttataaatactggtttttatcaaatgagctgtcgagattttctagatcaatataccggttttctcctttaatctgctagtgaagtcaacgatattaacagagttctgggaaagtgcattatccctgaactccaggaattcatttcttctcttgctccatgtttcctgtggtgacaccttcgtgtctggtgctgggtgaggcagccgccccaggggcccacaggtgtctcggtgttggagggctgagagggagggaagggggagccaccatggatcaggtgagaagcctctccacagaggcctggcgaggtccaccctgctgcagcagagcaggtgcctgcgtgaggagggcctccagagggcagcggcagggctgtggtgggacctgcttgtgctcggagagcactggctgctgttgtccagtgcttggaggtgaggggcaacgagggaggctaccactgtctttgaggtgaaagggtggtggccaggccagggtgtggtggagacagtgggcacaggacaggtttgagagatatttgggaacgatgggccccctaatggatggtcatgtgggtgggacccaggaccttccccgcaaattggtctctagcagacacctggtattgagatactcttgtactgggctgcaggggagagaggagaaggatgtggctcggagagatgacctctgtgcctcctgggccctcactgggactcccagcagccctggtgggcatccagtcccgcagtggtggccctccaccccagaaatcctgcaggctggctggcccgactgagctcgcactgagccccaccctgcgcaggggtggcctccagagcatggaaggctctcctcccacctgtcccgcagcatccgcagaggccgggctgttgttgggccaaggctgcgaggcagaagcctggggcaggtgaggtggctcctgtggacctgccgcaggctcaggcggggagcagagcaggggtctgtgcctccggagggctgagtgtgtgctggatgtatctggcaggatttcactgggcctggtctccctggggctattgtcgggggccccaggtggaggtatctgccagcagggtgtctgcctgtcgcaggtcgcctctgcatggggtcactgggtcacagcccactggcctgctccaccaccaccagagagccccagcagggcaggctgccagggggttaggggctgggtgggtgggtgggcgtgaagatggggcagggagcaaagctgagggcaggcagggtggtggtgggcagggcctcaggggagggcccatcccattcgcaggtgtggtgtgggggacagggttggagccccttctttggcctgggcctgtggccagggcagccagggcctggggactggtgaagaggaggttgctctgtgcccagacagaggggttgggaaggagggagggcttatctgtggtgcctgggctcaaccttggttctggggtccccagtggtgtggggaatttgcagagagcttcatgaggatttggctttgcccagggtgtgagacctggccaggagacctgatggcaccccagctgggcatgggggccatgctgggttcgaccagcaaagcagaagctagaggtaggggttttccggaggcactggtgctggtgagcccgactgcagcctgggggtccctgcagttcactggcctggacacacagacccgcgtgcttcttcggcaagactcctttgtgatccatgaattggggccagagcgatgagatctcctgggcagtggccggggctttgcttcccacgctccagagctgcgtcaccagggcgcccagcttcctctaccccagctccctttcctccccgctgcctaaatctcttgctcgtgggcccttcgctgccagcctgggacctgcctgtcctgttgaaatccccggctgtagccccgtctccaggcgcccccctcccggctgcagccacctccaccttcttgggggttgcctggacttgtttcctctacggcaaggccttggtgcctgtggcctctcttcctgtgctggctgcctgcggcccgtccccacatagctgtcccttcctttgggaagcctgtgccgggaaggaaccacagagctgactgacgtgcagctggctgagcccttcccagggtcatcgtggccgcccccacttccaaggctgcaccatgtggccaccgttccaggcaggctgggctgggcagtctcaggctccttcatgggaacttgctgctgctgcagcttgtcgataagcctctggctgcgggagaccacaggtgaccatggtggccactcacaggcgggcagcttgacttcaggggggaagttaaaggcggagtcggtgcatgaaaagctgtgtgttccttctctgaacagctgtgtgccctcaccttctcattagcttgaaaccatgatcctatctttttgtttgttttcgagtcagtcttgctctctcccagacaggaatgcagtggcgcaatcacggctcactgcagccttgggtgggctggttcaagccgtccttctgcctcagcatcccaaagagctgggaccacaggcccaggccaccgtgtcaggatagttttttagttttttgcagagacggtgtcttgctttgttgcccagactggtcctgaattcccaggatcaagtgatcctcctgtctcagcctcggaaagtgctcagccaccacgcctggccaatcttataacattccattttatgcgttttaatcctttaaaaaaatctccctggccgggcgtggtggcttatgcctgtaatcctagcactttgggagcccaagacgggtggatcacctgaggtcaggagttcgagatcagcctgaccaacatggtgaaaccccatctcaactgaaaatacaaaaattagcccggtgcggtggcacacatccgtagtcccagctgcagaggctgagataggagaattgcttgaacccaggaggcagaggttgcagtgagccaagatcacaccattgcactccagcctgggtgacagagcgagattctgcctcagttaaaaaaaaaaaaaaaaaaaagtctccctaggctgaggaaaatttttatgcattaaattaaaaaaattgatctggaccaggcagtgtggctcacacttgtaattccagcactgggaggtgggaggattgcttgagcccaggagtttgagaccagcctgggcaacacagagacagactgtctgtataaaaaattaaaagatgaactgggagtggtggtgcacgcctgtagtcccaactactcagaaagctgaggtgggggcatcgcttgagcccaggaggtcgaggctgctgtgagccgtgattgagccactgcactctagcctgggtgacagagtgagaccttgtctcaaaaaaacaaaacaaaaaaaaaacagcattttttaaaaatgtatgaactttttagatctctttataaatatctgtcactttcacttgaggtttactaaggaagtatgattcacttgcaggccaaatttaggtttatccagatacagctcagtaaaacctagctgggaattcagcagtggcgcgatctcggctcactgcaacctcagcctcctggattccagtgattctcgtgcctcagcctcctgagtagctggggctacaggcgtgtgacaccatgcctggctgatttttttgtgtatttttagtggagatggggttttgccatgttggccaggctggtctcaaactcctgacctcaagtggtccacctgcctcggcctcccaaagtgctgggattccaggtatgagtccccgtgcccggcctgaaattctgttttaattcctcacttcaccattttccttaagtttggcaactggtgtttcttgagactccccacaccccaactggctgagtcccagggagggcagggacgggcagggggacgagagactccagaactgctgggtctacggtggaggtggggctggcttctggccctttgcctgttagctcgtacccgtgggagctgccggcctcgctcctggatcatggtcacgtcctccatgccagccccagcctggcgcacagtgggtctgtttacaggaggggaaggacttgcgggtgaaggcagaggaaaggccttgctggagactgaggcaggctagtcacttctatcttgtggaggctgtcctgccccacactaccagcacggactggggtggagcacagtcccggggccagtgttgaaggggtgccctggtgtgggcagggcccagcattcctccgtgccccctgcagcgcagtgagtgaggcagagctgacctcaccctgccagtgctacctgctcccccaggcgtgcgcagtgacacacagctactcctgcgggctgaggaggctgaccccattagccataggggtggttggatcagagcagctgcgaagggtccctggtggtcgtggggggtgggtgagggatggagctgcagtgtcatctggcggcagtggagatgctggcgagtgggcagactggggggcgcagccaggaggacctgtggggctgcctgtggggcatcctgaggctgggtgggagaggcagagaccagggtgcaggtcggacctgtcatctttggagccagtgtacaaggtgcctgacccagggctgcgcagaggcgagacgcccggggaaggggcacactgctggggccggggaggtgggaggtggccgaccagggtctgggggcttgatctcagcagcctgccagcccaggccctggagttgggccggctgaggaagttactgggagatctggatgggtgggtatctcctgcagggcgcgggtaacggcttcaaggccctcgcacgtgtgtcccacaggctgttctaagcatggctcgttgcagtggactcggggggctgtggggtgggccgggggctgcggagctggggagtgggccgtccgagcgctcctggatccggcctggtgacctggcagtctggctggggttagcggggtcgcgtgccccagaaccacaggctgggggggaggggtgcgcggtgcggccgggagcatgcgcccggggcggccctgtccggcgcattgatcagctgaagccccgcccctggccggcaagccctgccccggacctccgggctcctcccccggctgcggcgctggcctgggcagtgcggtgcggggctggactctgcctggtggtggcacagccgccctcagccccggcgcagacatggacccctcgcgagccatccagaacgagatcagctccctcaaaggtgcggtcctggggccgggcccgagccggggggcgcggaccacacagtgacctctggctgggtgcagtccacgcagggtggcgggcagggtctgccatccctggggtgacactgtgggtcgctgagccagagccgcaggagaccccagactcgtccccctccgggctccacctggttcggggtcctactgggctggcttcagcggctccgcagccctgcaggagcgtcgggggcggggtggctgctgcagcggcggcggcggcggcggcggcggcggggcggggacagggacacagtgggagctcagccttcacagcagggtcagccccttccacccggcccgagtttgccgcccacaacctggcgtccaaggggcagggcagggctgggggaccactgtgcagaggcgccgggccggctggccctgagcaagtccacactgcggctctttgtcttggggtggggtgggggggctgggggctgcccaggagccctgactggttgctctggaaacccaaaggggtctggagtggggggagaaggggccgcccagtcgcacaccctggccctcccagtgctgaatcagctcccgcttcggttcccacagggtgggggcagggggcggtagcttccgcccgggggtcttgggggacgcctggaccctggcgcaggggtgtgtgtgcttcggggggggtgtgtgctgcaggaggtgtgtgctgcgaggcgggggggggtggcgcatgccgcaggggggcgtgtgcggagctggcagggtgggccaggaacattctgctccgggctcctccctgcggcttcccttcccgcctgcaggcccctggctggtgggagggaggggactcccgccgagccccgccccatctctgctggaggaagctaccgccctttcctgcccggagccggcttgggggaggcggggctggttgggtggcggcccagcgggggtcagtcctggcacccctgcaggcctgtgtaggagagaacctaggtccacgtgcttttaagaggccttgggatcattttgggacagtgtgggtatcgtgggttagtttggtggggcccttggagatctgggggggattaggttagggaatcaggccaggaagatgcggtcggcctgccgggagtgcaggaggtcagtgtgggggggtgcgctgagggactggccaagagggtagggccttctttgggcacagggctgggcaggcttggacccagctggtgttgttcccaaagccacaaccctggtgggtggagggtccgcaggtgctggtggtccgaggggcgtggccactgtggtccctacatcttcctggagcctcacctcctgaggctggccttttcctgcctggggctggcttcagagggagggagagccatgccgcagcgagctggccctgccagagggctgtgggaaccgtggctatgccttcggagtttccccgccaccacacctctgtgtacgcaggcgtgcgcgtgcgcgtgcgtgtgtgcgcgcgtgtgtgtgtgtgtgtgtgtgtgtgtgtttggagcctgcaccgtggcgccatggcgacggccccataaacccgcccccacaagctgcttgttggccgcctgccggctgctggccagcgcctcccacctcgggatcccccctctctcccactcccccccaccgccctatttataatcagttcccgggtttgccgggcttggtgggaaggggtgtgtcggcttggggcgagcagcgatacgggtgggggtccatggagcacagcgtgggacagtgggagtgttgggtgcggttctcatgcctggaccctcagtgggggcggcagcagcggggcggggaggggggggtggatgatgggtgtggctgggccaggcctgcagggcctcacagggcagtttcctcttcccttcccttgggccctggccgtcttctggcctggcattcttccaccctgcagccatccatctggcctgcagacgggcacttgggctgcccagggtgggcatctgtgggcggtagggactcggtgactttctctgtggcagcggctgggaatctctggcctccaacagctgggttggaggtgggggtgaattgaggcccctctgagccccctagccggtgctctgctcagagggctgtgggcttggagaggccactcctaatctggcctggaatgggaagtgttaacttgagtggccactgcctctaagcctggtgtgtggaggtgggggctctgtccgtttgcccgcctgatggacagcagcagcggtgcctgcagccctcctcatgtgctgtggcagctgcccccagccgctcccctcggacttcctcccgcaagaccccagcttcttccccaggccctagtcctctccgctcaagcctcgcatccctcatccctccaggcctggcagcccagcaccccccttcagatccttgtgaagccgggacaccagagcccacatccctgccgagtacccctcctgccctcagcccccctgcctgccctgccaccctcttctttagactcttggtctatatccgcccccacttgccccagcacagtcttagggaccttgaaggatgtgtttagaaactgatgtcatttctgacgttggagccgtggggcctggtggggggaaaggggcagctgtgggggtggccgctgcctcttgaggtgccccccactctacaagggccccgtcggctgtgggtgggaggggccgcccatgctgctgagtcagagggggccggcccggcgtcctggaggaaggcgggcagccggcagtgccggcagggattgcacggagccaggcgccacgagccacacagccgggagcccgcgccctcacgctcagcaccccagcctgcctgcccgcccgcctgccctgccgctgcccgctgtcacaccctgtagcgcgggagcttctcgcagcgccccgggccttctcgtggtaccctgcctgctgcctttgcccccgcactgactgcccggctccagcagccatggtggccggcatgctcatgccacgggaccagctgcgggccatctatgaggtgctcttccgcgagggcgtgatggtggccaagaaggaccggcggccccgcagcttgcacccccatgtgcccggcgtcaccaacctgcaggtcatgcgtgccatggcgtccctgcgggcacggggcctggtccgcgagacctttgcctggtgccacttttactggtacctcaccaatgaaggcatcgcccacctccgccagtacctgcacctgccgccagagatcgtgcccgcctctctgcagcgcgtgcgccgccccgtcgccatggtgatgcccgcacgccgcaccccccacgtgcaggctgtgcagggtcccctgggctccccacccaagcgggggccgctgccgacggaggagcagcgggtctaccgtcggaaggagcttgaggaggtgtcacctgagacccctgtggtgcctgctaccacccagcggaccctggccaggccaggcccggagcctgccccagccacaggtcagctgcaccctgaccccaagtcatgatgggtggcaagtaggggtctggttgtcgggtcttgggcctgggcctgggctggagtggttggagtggtcagccggcttgcggagcgtcgctcacaccagcaggtggccccccctagccgagggtcagggggtgcgcttgctgatgggcccatgtggcccctcctcctcggctggggaccttcgggtgtgtaggccaaggaggagcctgtggcccaggcacaccccggggcgccccctcccctctctccaacactgcccttgccttcgccccctccgcctcctctcctgtcccagtgacctgtcttccccgaggctcctcggcactgaggtgggggtgtgcgaggaggtgctggcgccggttgggtgtggccctcctccagcacatggcctggccgcctcccttgccgcgggggttgatgggtgaggcttggtgccgcacagagtgcccggtgtgaccggtaactgagtgcttggccagcttggacttggtggtggctggggacggccctgggcgggatggggagaagcgcagggtccaggcaggaggctcctccggcagggcagaggccaggctgtggtgtggtgtctgctggcccagcctggggcctagataggcctttcccggtacgaaccaggtcgcacaggacaggacgggtcctgtcatcccagaggcttccagagaccctttgctctgccccttctctgtggcctccctctgtccacaagcacctgtaccagcaggacccaggtgggcagatgtgtcccctgcagcccgaggctcacacacacactgtggagcactctgccctccgtgctggctccggatggcccggtcccccagcacctggccccacctccctctttggggctggcacctgggagcagcttgctctctcaggctgaagaagggggcctggggtggggctctcagggtgggcaggatttgccagggtgtgggggagggggcccaggggaggcccaagtttagggcgcagctgcccgtgtgggatgctgggcggagccctggtgctggctggcctggggtgagttggacttgttaggggcttgccttgggcccatctgggaggatcagtgaggctgtggggtggaggctggcctcccctcctggctctctctgcggctttggacaggtttagtggcctctccagctcctctctaaatggacgacatgtctcccgacaggaggcatgagacaaagactgcttggccaggcatgtagtccaggccccggcccatgtggccttcctgctgtcctctcccacccggcacccctgcccacccactccccggtcatttggcagcccagcttccccatgctcaactcctagctgtggtgactgggagtccctcccctcctttttctccttccttgtccgtggctgggctgggcctgcagggcgggcagctggcggcagggccaagagtggggtgtgctgggtgtggctgcagcaggcagagcggagggcacccctccccgatggaggtgactcagtccccccaaagccacagccgccagcagcagctcagagtttccaacaggaagcgagccacagctccgggatgagtcagggccagcaggctcaaacccctctctgccctggacctcacgggctgagcttgggatgggaagctaggggaaggaggcggctcggatgtggggtgtggcagagggccagggctgggcctcaggcagtgacaggggtccggatggccctgcatacagcccggggcagttctgatgatacctgagaccaggcacttcttggagtttttaagtgaccaagcagtgagctgccctgcccttccccactgcacagccgctccgtgggttggcagaagggcaaggtcagagctcgtgggccaactgtgctggtccaggatggccctgttggatgggctgcccctctccacccagccctggctagggagcaccagctgtacccctgcagtgaggcccctgccctccctgtgccctggtggtctgcttgtccctgggtggggcccatgggggcctgccagcaacacatctgtgtgggaagccatccgtccacctgcttgtttagccatgcacaggccagggccagacccagatggagcccctgccccagggggctccagatatgtggggtgaactgggtgaggagagcgtgatgggaaggtggcttcagaagcaatcagggagggctctgaggaggtgcctaccctgccaggagcagcccagagagagggacagagggaggccggaaggccagagggagaggacccatgggaaggccctgggcctgtggcagagtttcagttgcttggtgtggtgggaagctgtaggaatgtgtttttatatgtgagtttcatttacgtttcatttttattttacttattgttttgagatggagtcccgctctgttgcccaggctggagtgcaatagcacagtcttggctcactgcaacctccgcctcccgggttgaagcgattctcctgtctcagcctcctgagtagctgggattacaggcatgagccaccatgcctggctaatttttgttttttttttttagtagagacggggtttcgccatgttggccaggctggtcttgaagtcctgacctcaggtgatccgcctgcctcagcctcccaaagtgctgggattatagctaccgcccagccctaatttacattgcaaatggcgatgctttgcctggctcaaaattctgaaggaaccgaggattgtgtggaggagacgccagctgagcgctgtccatgcaccagcaacgggcaggggccaggtagccgccaccacggtgagcgctgtacacgcacagcacctagagctgcttcccacagcaaagggcaggggttgggtagccaccatgacttcccctctacacggaggacacgcctgtgccttgacctccccccttgaccctctgtggccctgcgtcaaggaggaagcctggaggtggcctggctgccttgcccttcttcccagccacagggtgctctaggtggagggactatggcccggccagctttccacagggatcactggcttggccgagtcacccgtttgcgggatttctgtagatcgccggcaggcttctaaggggtagttacgatgggatttgatttgcacttcactggtcagcaagcacctgggtggagaggtatggagaggggaggcaggtgtcaccattgcccctggacagatgcctggggctgtgctggttggggaggactcaggtggaggaagagaccacctttggggctgaggaatgtgagtctcaaggagtggggtgtggtgggcagtttggggctctgctcccgcctggctcctgaaataccgctgggcacatggatgcctggaatgtgggtgggagggtgggagggcagggctgggctggtggggcctgcagcgggaaggggaggctacagggtggggtctgctgggcggggggtctgctgggcggggcaggaacagtagggaagacccgtgggctggggccggagggctctctgggattgcaggcaggccagtcccctgcacccccaggcaggtctgctgggctggtctgacccgtcagtcggctgggcttcatctctgcttactgactaaggggtggctgcgaggaggagccgctgctaccagggcatgagtgggccctccctctgcctcccaccccttccctccttcctgcctcgccttcctccctgccggctctcggagcagcctggcctgtgtggcagccatggacaggtacagcatggaggagctgattcagctgggccaaggtagggcaggcagagctgggggctgtgggaggcagaggagagggccggggccgcctctggcagacctgtctcttcccgttgtccaccgttctgtgccgtcagacctgggatgcagggataggcacagccccctctcggagctgccccaggggtgtgtgtgatgtgtgtcccggaagcacaggcctgtccggacctccgtggagtggtagaagaactgcccgctgccagcctggggcactcctcccgccaggagctggttctcacccaggccattgagtcaggctcctctgaggcttccccagcacgtggcagggagtgggctgaaacgtccggcctgtcggcccctgcccactgctggccagatgctgtcctgggctcagctgggagttgggccctttctggcatgcctgggtatccctgaccctcagggctgcctgggcccgcccgacccctggccgcccagagtgggccactgcaggcatttccctcggccgcacgtttttgaggtgtggggctggagagcaggaggctggggtgggcccggccctcttgttgtccgcgggcttcccagcatggacctgggtggcctgcccagtggcccggggccaggctggttcactgtgccttgctgtgggctgaggtaactacactggaggccacctgggctcagatggcagcgtgcgggacagcaggcggcgcctcaggctcctggtctgtatgaggccttcatggtataggacttcatggggtttgctgagggttccatgtggtgccaggagcgacgctgtggaatggggtataccgtcaacgtgcattctcctgggcctgaggggtgcgcccagcagacaggggtcccaggaagaggagcaggactgtgcgtgtcccacgtcctgtttccccggctgcattgggatctgatctgcataggatatgctgtgggcctgcctgtggcccggctctctgacccaggccttccacagagcagggcttcgggactcctgggtggagccaggccagtctcctgccgtggcccaggagaggcgtctccatcccagatccctgggaccccaggagaggctgtgctgtggggcaggcgcaggcctgagccctggtttcgggctgcctgggtctctggcctgcgcgtgactttggggtggctgtcccggccaccggtggggccaggtgctgtgttgagtgacctgcgcagggccctctgggagaatgggcggcctcttctcttggcccctgtggcctttccaagagcaccccctggcttggcagggcaggtgggtggggactgcaccgcctcctgcagggacgtgagcccgcacctcccgcgccctgctctattatattagaaccccctgtgggagctgggggaccgaggtgtcgggtggcaccgtccagccagacctgactgcagcggggcctgggtgccctggcgccgtgcgtcatgttccaagtctgggtggtgacggtccttgcgcgccctcctcggatatttatatcccctgggcccctgcccactgctcccctcccccacaagctgctgctgacagcagcacggccgtgccctcctcccacccgacgctgccgccagtggcttgtgcctcctccgaggggcctgtgacctcccacacccctggcccgctccgtctgccccgtgggctcctgccaccgtccccgatgaagatcgtgcccggtaggtgggcagcccttgaaagccttgtgaaatcctggccccttgctggggacaggggccagagggctggggctgaggctggaggccaggggcgctgtccctcgccctgcacacagcctgcctcatgtgccctcacccagaccccctcagccctggtctgcagtctcacttttggggtgttggggctggtgaggagggcgaagttgaaggagtgcagtgggttcagctgcaggcttgaggtgggggctctggcatccctccatgcctgccagctgtccccagagggcagccttggaggcagagtgggctgctcgggcccctcttctggtggggacagcagggggaggctgggagggagggagggtgtgtgccgaggccgcgggcagtgctggggggctgcggcttggccaggcgtgcggctggcccctcctcccggcgggtgtggccgcggggacgcaggggttaaggccaactaaccttgagcgtcagtagccctgcgcagggacagctgagccggccgggtggggagcgagggtggggaggcgccgagggccggacccgcggagggaggaggagaggaggcgggcgggagctgttgtggggctgccgccgcgtatggggcggtcctgcgggcagggcaggctccggtcccggcgctccccctcgctcgccctgcacgcagggagggggctgtctagcctggagcagccggttcccagcgcaggaagggcagccctggcggctccgcgtggcggctatggagccctcgggcagcctgtttccctccctggtggttgtgggtcacgttgtcaccctggccgctgtgtggcactggcgcaggggacgtcggtgggcgcaggacgagcaaggtaagccccgctggtggctgccagggactcgaggcggggcagaggggccgcctgcctcccgccccttcattccctgcgccctccccttcctgtttccaagctgaatgtcagtgaaagcagtgttgcccctccaccccaccctgcagtgtagaccctgaccctgctgcagtcccagggcggggcgggctctgcagtggccctcagcctgcagcctgtgcgggacaggtgggtggaagcggaggccggcagggcaggagcgtcccccacacgaagggaggcctgtggcagccgccgtggcagggacaagtgggcaggtgcctgtccggccagcactgaggtggaggtggctccctgcacacacagcagggggtggagccacacgcaggtgaggcaggtgccctcatgccctcgggccgcacagggggcgggggcagccaggctgtgccctgccctccctgctcaaagtcaccagctcctgggctgtggtcccaggtggcaaccgtgcccagcacaggatggggcggggccctggggattgggcagcctcaattatgggcttctggccagagggactgcctatcggggacctggctggccagacctctcctgcagtgagggcgctgcctggctcagctcctctgctggatccccggacttgagatgagtcaagatggggcttctaggcgtggcgctggggacgcccggagctgccggggactcagctgccaggatgggacttgggctgagggcttcttccccatccatgtttttggctggggaccagacactgtccctgcctccccacctcagcccacaattgcccccttcggccacggtcctggctcacaggatgcctctactccctggtggtgccagacgcggctcagctcctcggttctgcctccagcgttgtctgcccaccacctggccccatgccctgccttcctccctgggccctgcagtccccaccgcacatcctgctgggaggccccctcccatgccgcttcagtcccagggcagcctcccagcccggcccgtgggttggggcgcggcttcctggctgcgctgggcggggctgcgcgccaggggcaggttctttgggtctgggcctcgctcccgcagtgggcggattgtgggggggaggtggaagaggtggagagcgaagccggcagcctcgcagcgtgggctggaagcagaggcgccgccgcggtccagctccccgcactgtccgtgggccgaaccagggctccggccgtggccggcatgtcgggggcggggggcgcctttgcctcgccgagggaggtcttgctggagcggccgtgctggctggacgggggctgcgagccggcccgcaggggctacctctaccagcagctgtgctgcgtaggtgggtgcagtggcgtggccggtggcacagaaggggccaccatcgctctcacctagtggggctgggtctctgctgggaaccgccgcctgggctgggatgggggtggcgccttggcccggtgcagccttgcccccgagctccggaaacacctggggaggaaggcggggtgatgttcccctacccccatttgtttgtctctagagaaggggctggagggggcggggctggagggggcggggctggcccacccccggctgttccacgtcagcctgggctttggcctgggtttccaggacacgggggagggaggaggtgctgaaggcggggctccaggccttctgtggacttgctgcagtcctgggccagtgggattcccttcccagtcttggggtttccatcctaggaccgtctccactagctgcgggacctcagccatagggtccacacctgtaaaacgggggcgatactcctcagagggccacggcagtgcctgtcgtgagggaccctgggctggcggccgagggtcagcagccctggacagcacaggtgtcaggcaggtgtgcagaggcacctgagctgggggtgttctgggtgcgtcccaggtgggagagccagctgagctgcagctgtagagggtgggtgtagcctggctgggtggggcgggtgtgtctgttggttttagggtcagaataggattggatggggcggggcaggctgggctgggagggaggggaggtgatgaggagggaagagctcagagcaaagaggcacccagaggcaggaagtagggaaggggagcttgagccaggcttgggaggtggaggcccctgaccgagcccccagcccacctggtcccagccctgccccgccccagcccttctcctcacccggtcccagccttgcccgagtccgtgtctggagtccccaccgtgccccttcccttccctgagcccctgccccattcctgaccctggcccggcccagggcggcatctttggaggcctgttagtggcagggagaaggctggaacaggggcctggctggggtgggctccacgtgggtcctggaccttggccccggctcccagtttccagctgtcgtggactccctgtgcccacctccctggctgttccgggatctcacactgtgcctcagcagagtggcagccccgttcctgcaggcaggagccacctggtcacggccgggcccccagagcccatacccagcaggcgcggggcttggcctcagggtagctgctggcccagggcttctgaagaggcgacagtgtttccagaggctttggacccagggaggggcggcagaggtgtggggtccggggtgcccttgggcacaagactggaggtgctgaccagtgcggggtcagattttgatttgggggcttctggtgactcctgaggttctggaggctgctgggccggacaggcagagcaagagggtcaccctgaatctcatgccaggctcagagaccatgcatggagaccaaggggtgtcttcgttgggcggcgtgtacgatgtggcagagccctaggggctggctgtgccccttggcgtggagtgggggcttccccacctctgaggggtttgggcaccccccattgtgagggttctggtgccccctcacggcctcaggggcagtaggaatgaggtggggtgagctcttcccagaactgaggccgagtgcagctcccagctggaccgaatctgcctgatgtgcggctggaacattcttgtggttggggcagcgcattctttcctatggtggtcgggtgggctgggcaggcccagaagctggccagaggcagctccgccccggaccccagggagccggaggccccagccagcgcaggccctttgccctttgccctttacagcatgagactgcttcccttgagccccacccagctgcaaacagcaccccccacccctggggtcgcccaggtcctgcctcaggtgtggcttcccctctgtgagtcacaggcttgggccccctccccatccctgactcactggcgaggcccctcctggggcttcccgatgctccattcccccatgaggcccggcctccgtgagtcagccctcagctacgcgcctccgacgtgaggtgtctgcctggggcagggtgggctccgcaggtgggcactgctccaggatgtgccaggtgggcagcttgggaggggccaggcctggggtgggaccccactggccccagggccagggcaggcaccatggggcagggtgtgctccccgcttcatgcaggtctgtgaagaggtgtgattggggggctgcaagagctgacaggcagcaggtcccctcccctcgccaggtatcagcggcttcttgagtccgccctggcagggtgggtgggcagaggctgaagcagggcctggcccaggcctggagggagctccaaagagaggcgtggcctcagagcccctcccgtcgggggagcccttcagtctgttggggggtccttctgggtggctgtggggacggcctgtgttcctctgcggtcctggcaccatttggtgtgcagtgaagtgccagctccccgtgtccccaggtccccctagggggctgcagtggtcggggtgggtgaggaaaccccggtttcctgtttctggcgggccgagggcgtgtctgtgggggagggggctgcttgctccttcccgccgggacactcccctccctggcggcggcctgggcagggtggggcctcgggggcgggccggcctcgccggggagtacagcaggcagggagtggccgcaccgactggggctctgagctgagcctgtgccgagtgagcgtctcgtggggccgccagccttcagctgcctgtgtgccacacggggctgcccagagcaccgtgcctgaggccgagggtccgggcgacgaaggtgtgggggcagcatgtctcagcaccagctccgcgtgccgcagcccgagggcctgggccgaaagagaaccagctcggaggacaacctgtacctggctgtgctcagggcctctgagggcaagaaaggtagcagggctcccctcgggcacccccgccaggcagggcgggcccctgcgggaggaaggcccacttcctgtggcaggaaagccttggcaccgctggggggctggtcttggagatgggggtcgggggccagccatccccacccaacacggagtgggccgacaggcgcccgcgaggctgacgggggcctccgagcgtcagatgtcgggcctggaagggcgaggaactctgcgctctggggaaggttcgctgccctgtcagcagcacacgcggcttcccttccaacaccccagcgggcccgggccctggctctgccacacccctgcttgggtctcagtctgtagaggccgggggggactgcaggacgggacttgtgtgccctgggctcagggtgcgcccaggaccctcccatttcctcgggggaagagtccggggtggggtggctgcacctggtggcgcctgggcccctggcacctgggtctctgctgtgtggctgggctgcgggtgagggcgcctgggtctcagtgtgtgatctgagggaggctttggggctccccaggcaggacctggccagccaggctgctgtgtctgcacggtggtcacctgagggcccccggggcttctcccaggccccaggtaagctggtcttgtctcccccagatgagcgggatcgtgtgcagaagaaaaccttcaccaagtgggtcaacaagcacctcatcaaggttggtggcgcatgctggtgcgtgtcacaggggctgaggctgtgggaggcgctgagggagggtggcccctgccgcccaaggctgtccccatgctgcctgtgtgctcacctttcatctctgaaacctgttattttctgtcctctttcttccctacgcctgctcctgcctctctcttcctcctcttccttctggtctttcctggtctctccttgcagcactggcgggcagaggtaggtgcctccgtggggcagggtgtgttccgtgggctcccgggagactcagcccccgcctccttccctctgggaccagcacccactctgtagatcagccactcagggcctattggtggctctgggggactggccacctcagccgctgctgtccccacaggcccagaggcacatcagtgacctgtatgaagacctccgcgatggccacaacctcatctccctgctggaggtcctctcgggggacagcctggtacgtgtgcccctgccccctccgggccccgcctgccccacctggagacctctgcctgccttccctccttggggcctctccggccgcccactctacttggaatccagctcaacccctcctgccttctccctgggggcaggctggcctcgtccctggcagcacctcccgcccaggctgctgggcatcacagccgagggcctggcctgggagtggccgcaaccctcggacctcggctgctctgggccttgccgccctccgcgtcgggacacagtaacctcatgctccgctttgctttggtttctctgctgcttggactctgaaccttgacctctgccctttaccctttgccctgctctggccgggcagccgagggagcgggacgtaagcaggagctcacgcctggtgagtggctgtgcctgccggctgcagcggcacgggagctccccaagaccgtggagcccggctttctgggggctggtggcccgtcggccaacccctgcctggctcttgggcgggtaggtggttgggtgtcaagctgcccgtccaccgtgctgcccagagctggcctgggacccaccggtggctgctgtggctgccaccgccaggcaggaggaccccccctttagtgccactgccctccacacgaggcttcctggctattgtctcctcccaccccttccttccttccctcagcctgggtcgctggacttcccgagccctgatgggcctggcctggcccctgggccggtggcctccctttccctgcgggggagggtgaacctgggatgaggggctgctgccccctggggaagacccttggctcggttgctgcggcgctttggggcatgctgagggtggggcccgggagctgcagctgcactgtgggtgctgactgtgcctccccacagccccgggagaaggggaggatgcgtttccacaagctgcagaatgtccagattgccctggactacctccggcaccgccaggtaaggctgcccggcaggccctgggccccacccagacccctcaccaagccagccccgccctgtgggccgtgaccgagagcccctcgctcacaggtgaagctggtgaacatcaggaatgatgacatcgctgacggcaaccccaagctgacccttggcctcatctggacaatcattctgcacttccaggtagaacggctgcccccaggacccccaccccctgcaggagtttccagggtagcctgggctccttggctggcgggttgatccgctttctggctagggcgtggcctgggaggtgactggcgccgtaggtatggtggcacctgggtgccttcctgccagccgcaaccctggactggatctgtggcctgagggtacaggcctctctctgaggccacctatccgtgccctctggccctggctgggcagggcccagagcctccctgtggaggaatgcaggccccggtgcctgccctggggaggcttctgcgcagcacaggctgactcacccgctgcttgtcctggctgcacaggaaaccacaaatctgagagctgagcaggcagagcctggtgctggcacggcagctgagtcacacaggctggcaggacgacaggcagctaggggtgggtgggcagaacctggcctgagcatgccactgagtgtaaagccaggctgccagaggccccacctgccagcctgcaaccatcgatggagctcgacccccagccttttccaggcctgggggttctgggccaggtttagtggtacacttgtgggttcctcttatgcccactgcccttccactctgctccatcccagctccgggaggtgcagggtgcagcctagccctccccagctaggggagtgggcacctgctgtgtggtggcagtgagggttgggggttctgagctgcgtggtggcagctgccaccggctggagtggctggacttgtggccccgaggcatggccagtcccagcagcttcccaacagggaagggccctggagcccggtgctgccctggctggtttggtggccccatgcactccccctgggtgctgagctacccctgcccctgtgcatgtggctgtgggcacagagcaggcctggtggctgtggctgagctgtggcctcctctctgctgtgagcagatctcagatatccaggtgagtgggcagtcggaggacatgacggccaaggagaagctgctgctgtggtcgcagcgaatggtggaggggtaccagggcctgcgatgcgacaacttcacctccagctggagagacggccgcctcttcaatgccatcatccaccggcacaagtacatggccccgggggcagggggctgtgggctgggggcacccccacagcgcctccactaggcaacttcagacacgttggggcagggaggagggcaggaggaacagggatgagtgccagctggccgcctcggggtggtggagttcagggcccagccccaccctggtgtccttcagaagcaccaccacttgatctcaagactggagggcccgcgggctgctggtcctcacagccaggtgcatgtgccctctgtggacgcctccggaggggcctggtggggagggtggctgcagggaaccccagctgcctggcaccctcagctctgcgcagtcctctgtgctgtgcccctgggcttctgggtgtgggggtggcagggtgctctcagctctgcccatgtgacagtgtatttttcagggtgagtgttgggggggtccatggttgctgggatgtgtgaggagccggcctgtgcacccgcctgtgtggtgtggccgctggtcttgtcccacccacctgaccagccacctgcttgtcccaggcccctgctcatcgacatgaacaaggtgtaccggcagaccaacctggagaacctggaccaggccttctctgtggcggagcgggacctgggagtgacgcggctcctggaccctgagggtacgtctgcgtggccttcctccctgtcccttcccctgctgcctgccccagagccaccgctgagctgcccttccctgcagacgtggatgtccctcagcccgacgagaagtccatcatcacctacgtctcgtcgctgtatgacgccatgccccgcgtgccggacgtgcaggatggggtgagggccaacgtgagtggggggcccggagggcagggggcttgggcctggacgccccgacgacccctgacagccgcccgtgcctgcccgcaggagctgcagctgcgctggcaggagtaccgggagctggtgctgctgctgcttcagtggatgcgacaccacacggccgcctttgaggaacgcaggttcccctccagcttcgaggagattgaggtgggcctgccgtggggggcggggtcctgggcctgccctgagagcccggcgtggttgccgacagcctcgtccctggcagatcctgtggtctcagttcctgaagtttaaggagatggagctaccagccaaggaggccgacaagaacaggtccaagggcatctaccaatccctggaggtgagtgggaccgctggaggggtgggtggtgtcctggaacgccccaggcctgaaaggttcttccggagccgacctggccctgcctttgggaccagggctgtcccaggtctggtgggctggggtctgaaggcccagcgccccaccccctgccccctgcctatagggcctgagtgtggcccctgtctacagggagcggtgcaagcaggccagctcaaggtgccccctggctaccacccgctggatgtggagaaggagtggggcaagctgcacgtggccatcctggagcgggagaagcagctccgcagcgagtttgagaggtgggtggggccctgtggtggcaggggaaccacccgagggtgtgtcactgcctgggaaggaaacccccctccccgccccgcccccggcgggggaacccaagctcccactcgccttaggacagtgggccacagccagggagaccggagcgggaggcgagctgcagtctgtggccagggctgtgccggacccggccaacgcggccccttccctgtgctgctgctgcaggctggagtgtcttcagcgcatcgtgaccaagctgcagatggaggcggggctgtgtgaggagcagctgaaccaggccgacgccctgctgcagtcggtgagggggtgtggggcaggcagtgggcgggagggaggccggaggagcctgccccgccctgcagccctaaagccaggagggggctgtccccctgggctcctggggcaggggcaggggcaggggcggggcatgtggtggggaatccaggcctgagctcctccctcctcgtgtgcagctaactctcactgcctgctttgggcagagttggtttctggccacggggcagaacccacgctgggctgccttgcccccgccaggccccctccccgacagcggcttactgttaggggaggggttgggggagggcccaacccactgctgattgcccaggaggacagggcccacgtggcattacaggaggagttacccagggtgggtgatggaggatgaggcccaggaccccacagacatggtcatgggggtctcggttcttggactgggctaagtactctggacttggtcccaatcccccagaaggccagtaggaagatgtgtgaggtgggcagggagggaaggggaaggacagggatggaggcagtggcccactgaggctgaggaagcggctgagggtggccgtcttggccggggcccctgtgaggtcagagggggatcagctgtgctccgagtcatggcaacgaccttgcaggatgtccggctgctggctgcaggcaaagtgccacagcgggcgggggaggtggaacgggacttggacaaggcggatagcatgatccggctgctcttcaacgacgtgcagaccctcaaggatggacggcacccgcagggcgagcagatgtaccgcaggtgggccccgccctgccctccctgaagcccaggtacacacggccccaggcccgccaacacctacctgagtcctctgctgccccagggtgtaccgtctgcacgagcgcctggtagccatccgcaccgagtacaacctacggctgaaggcaggcgtggcggcccctgcaacccaggtggcccaggtgactctgcagagtgtgcagaggcgccccgagctggaggactccactctgcgctacctgcaggacctgctggcctgggtggaggagaaccagcaccgtgtggatggcgctgagtggggtgtggacctgcccagcgtggaggcgcagctgggcagccaccgaggcctgcaccagtccatcgaagaattccgggccaagatcgagcgggcacggagtgacgaggtgggtggcgctgagcgatgggcagtgcgggggtgggccgggcccagccactgcagacctcaccgtctcatctgttgcagggccagctctcccccgccacccggggtgcctaccgtgactgcctgggtcggctggacctgcagtacgccaagctgctggtgagtgggggcagggccagccgggggaggtgggtagcccgcggcctgctgacacgcaccctcctgcccacagaactcctccaaggcccgcctcaggtccctggagagcttgcacagctttgtggcagccgccactaaggagctaatgtggctgaatgagaaggaggaggaggaggtgggcttcgactggagcgaccgcaacaccaacatgaccgccaagaaggagagctactcggtgagcggtggcccagctgccctgaaccccacagccccctccccagctgtgccctggccgtcccctatggtcagagaccagtgggggccctgggtcgagtttgctgggagcgtggcagagccgggtgtggccggccgtccctgagaccctttgctctggtgccaggcgctgatgcgggagctggagctgaaggagaagaagatcaaggagctccaaaatgctggggaccggctgctgcgggaggaccacccggcccggcccacggtggaggtggggctccctgggtaggggcggggctgcggggggggccgtgccgggtccccaggcggggcggggcggggcctgaccgggacctgctgtcccgcagtccttccaggcggccctgcagacgcagtggagctggatgctacagctgtgctgctgtatcgaggcacacctgaaggagaacgctgcctactttcaggtgagaaccggagccccctccgcactgtggctcagcggcagccttgcaggagcccctggaccccctcggcagctccaatcaggagccctcctgtctgcagacgttgccagctgctgcctgcagcctgaccggggccttggacaggggtgctccccaggcctcctgggggctttgccactccttcctcagtgcccccgtcttgggcctgccctgggacaactgtgggctggggctctggtcccaggtagcctggcgtgaccccctcccgctgccccagttcttctcagatgtgcgggaggccgaggggcagttgcagaagctgcaggaggcactgcgtaggaaatacagttgtgatcgctccgccaccgtcacccggctggaggacctgctgcaggatgcccaggtgagggagggggtgtgcaggggcgtgtcaggaggggctggcctggagtctgggctgcacgggtactctggagactagggggcaactggaggggccagcaggagttgggaggcaccatgggaggtgtagaggtcagccgaagcgggaatgaggcaggatgttctgggctgcatgggtactctggagactagggggcaactggaggggccagcaggagttgggaggcaccatgggaggtgtagaggtcagccaaggggggaatgaggcaggatgtggggagccgagaggcagccggtccaagccgggccgcccccatctccatagccacagagtgagtggaagcctgaagtcagcagctgccgccagcccttgtgctgtagaaggggcaccgccagcccttgtgctatagaaggagcactgccagcccttgtactatagaaggggcaccagctgtttggcctgagatctggagcgggcagagtggaactgggctttgtgctctgggagcaggggtgggatcacccaggagggcgggtgcacagtggggagtgacagggaagagggactggagactgaaatggcctctgaggtcggcagggctgggccggggggagagccggcagctcccaggtgtgtgccgtcctgcggcctggcccccgcagaggggtgggatgggaggaggcagtaccttctgcagcccgcaggggaggggcaaggggcgagggcattgtagggaccagagcgtagctgggaggacatggtgggtgagctggggtgagaggagggtgccctgtctgggttgggaaggagcgagggtgcatgggtctgcttggggccaacccccggggcctgtcccagctatacctcctgcttccaagtgctgccaccccgggagcatcaggagggccccacaggcctggtcccggggtctgggggtgcctggggcaggcctgtgggtctccatggccctcgtctggatgctgcccctcccccacaggacgagaaggaacagctgaacgagtacaagggccacctctcaggcctggccaagcgggccaaggccgtcgtgcagctgaagccccgccacccagcccaccccatgcggggccgcctgcccctgctggccgtgtgcgactataagcaggtggaggtgagcgcaggccgggggtccactggggggcgtggccaggcagggcagggtgtggccatgtcctcaccgactctgcccgtcccaggtgactgtgcacaagggtgacgagtgccagctggtgggccctgcacagccgtcccactggaaggtgctcagcagctccggcagcgaggccgccgtgccctccgtgtgcttcctggtgcccccgcccaaccaggaggcccaggaggccgtcaccaggtgggtggcgggggctcagcaggtgggggctggaaggcgggtggggcgctggtgacgctgactgtagccctgacctgccaggctggaggcccagcaccaggccctggtcacgctgtggcaccagttgcacgtggacatgaagagccttctggcctggcagagccttcgccgcgacgtgcagctcatccgctcctggtccctggccacggtacgcctgcccccgagccgggggctctctgggtgggaggaggggagaggcgttgtgcagggcacggccgcctcgcccggcactcagccccacgtgcttcccccagttccgcaccctgaagccagaggagcagcgccaagccctgcacagcctggagctgcactaccaggccttcctgcgggacagccaggacgcgggcggcttcggacccgaggaccggctgatggctgagcgcgagtacggctcctgcagccaccactaccagcagctgctgcagagcctggaacagggtagggcacggcagggctggggcggttgggctggtgcgaggtgggcggtggagtgacccacatgtgttccccaggtgcacaggaagagtctcgctgccagcgctgcatctccgagctcaaagacatccggctgcagctggaggcctgtgagacgcgcaccgtgcaccgcctgcggctgccgctggacaaagagccggcacgggagtgtgcccagcgcatcgccgagcagcaggcaggggccgtccccccccatccagtcccatccctctccccatccctcctcccaccctccctcctttggccttcaaggggcgctgtgtgctgcgctcggtgatgagtgcgttcccactccctgtctttgcagaaggcacaggcagaggtggaggggctgggcaagggggtcgcccggctctctgccgaggccgagaaggtcttggccctaccagagccatcgcctgcggcccccacgctgcgctcggagctggagctgacgctgggcaagctggagcaggtccgcagcctgtctgccatctacctggagaagtgagtgcacctggccacaggcgaggggctggggtcggctggggggtgctggggtgagggctgtgaccttgcaggagggtgcaggagggaacgagttgggggctgttcagagatctggccaggaggcgggaggcccagctggggtggtggccgcagaggtggtgagaagagttcagggctggatacgcttcgacagtggcggccgggggacttcctggtgatgagattcgggtgtggggaagagacagtggagctgggcagcggctgctgagtgaggtggggaagctgtggatccactttcagtggcacagtaaggaatcctgcaccctgcctctcgtctgtcctgttcctggcctggacttaagggcctctggcatttatttccaatgtgttatgtcatagtctcttcctgtgttgcaaaccacaggtccacccgctgtctactcctcacagaaccagcacagtgatagggccgccgcctcttcctgtgttgcaaaccacaggtccacccgctgtctactcctcacagaaccagcacagtgatagggccgccacctcttcctgtgttgcaaaccacaggtccacccgctgtctactcctcacagaaccagcacagtgatagggccgccgcctcttcctgtgttgcaaaccacaggtccacccgctgtctactcctcacagaaccagcacagtgatagggccgccgctggctaccacagggtgccatttccaccccggtgtccccttcgcccagtcttgggctgcaagggctgagaactacgcttccaggccctgtgggcaccaggatgccgctgtcatccagccagtgggctcgtcctgtctcggggccttggggtctgccgttcctggctggcgcaccccctctccaggctgggtcctgagtgtccttgtgttacagaggctcccaacctccttctccccaaggctgttcttctcctgaagcaagcctctgaccacagggtcagctgacccccagggttgggtctgggcttggcaggcagcaccctgggtcgctgtggcttgggttccattcccttgggctattgctcgagccccatgtcatggccctgagccccgctttcccgccaggctcaagaccatcagcctggtgatccgcggcacgcagggggccgaggaggtgctcagggcccacgaggagcagctcaaggaggcccaggccgtgccggccaccctcccggagctcgaggccaccaaggcctctctgaaggtatcgtttcgaggcttgggcttcatggcggggtgggggtacagcgggcccagctgaagccgcacatgtccctcctgtccccaacagaagctgcgggcccaggccgaggcacagcagcccacgttcgacgccctgcgggatgagctgcggggggcacaggaggtgggggagcgactgcagcagcggcacggggagcgggacgtggaggtggagcgctggcgggagcgggtcgcccagttgcttgagcgctggcaggctgtgctggcccagaccgacgtgcggcagcgcgagctcgagcaactgggccgccagctgcgttactaccgcgagagtgcagaccccttgggcgcctggctgcaggacgccaggcggcggcaggagcagatccaggccatgccgctggccgacagccaggctgtgcgggagcagctgcggcaggagcaggtgggcttgggtcggtggggacggggcggctgggcgtgccctgcggccacggctctgaccacaccatcacccaggccctgctggaggagatcgagcgccacggcgagaaggtcgaggagtgccagaggtttgcgaaacagtacatcaacgccatcaaggtgaggcccagccgcctgcaccaggccccaagtccgggaccgttgccaggatgatggcgggctttccctgagcctgggccatgccagggaaagcccatgtgagggtttaggggctgggcaggggccatcggagggcagagctggtggctgaccgcagtgcattgccacaggactatgaactccagctggtgacgtacaaggcgcagcttgagccggtggcctccccggccaagaagcccaaggtccagtcgggatcagagagtgtcatccaggaggtagggtggggccgaacctaactgggtgaggggctggcaggcctctggctggagctgcagctctcgcagggctaaccctggctctactccacagtacgtggacctgcgtacgcactacagcgagctgaccacactgacgagccagtacatcaagttcatcagcgagactctgcggcgcatggaggaggaggaggtacagcccgttgggcggaggctgggcagagggttccatctcaccacctgttgtgtcccacacacagccacaggagctgcctgaggccacctctcgtggccctccccactctccccactggcgctgccagcaccccctgcccccagctcagcctgccccaggctgccccacctgtggcctgcccccctggcctggtgtggctacactgctcccccacagtggctggtgccgcctctcctccctcgtgagcgtcccccctgcagcctagcggccgtcctgtgggctcttccttggcgttctgcgttggcctttccgctcaaccctttgctgccagaagtcgggggtgctgagttgtggggctagggagggtcttccaaggcacccatctgttggcttctccctaccttctgcgtggccctgaatcctcttccgagttggctcgggtctgcactgctgtctccacgctggccgcctcgcctcaccccgccccacccaggcttcccaccctggtcggggagaggggtccagtggtgggagccaggcccactggtgtccagcagagctcaggcagggctgtgtgctgggtgtggctcgcaggttccgagctcctgctttgctctctctctccccgtccgtctgtctccgtcgcctgtctgcgggaagcagggaggacgcctgggcctccttccccaggctggtgagcacagtggggccggctgcgatcgctgcccgagcgccctgggcgggtgcacgctgtctcctccgccgggctggggcctctgtcttccccgacccctgctccgcgctgtctgagtgaactgtgccggtgcgtgccccgtcagcgcctgcccgtgttcacactctctctgcttctcttcttctctctgctgtggccacagaggctggctgagcagcagcgggcagaggagcgcgagcggctggccgaggtggaggccgcgctggagaagcagcggcagctggccgaggcgcacgcccaggcaaaggcacaggcggagcgggaggcgaaggagctgcagcagcgcatgcaggaggaggtggtgcggcgggaggaggcggcggtggacgcgcagcagcagaagcgcagcattcaggaggagctgcagcagctgcggcagagctcggaggcggagatccaggccaaggcccggcaggcagaggcggctgagcgcagccggctgcgcatcgaggaggagatccgcgtggtgcgcctgcagttggaggccaccgagcgccagcgtggcggggctgagggggagctgcaggcactgcgtgcacgggcggaggaggctgaggcacaaaagcgacaggcgcaggaggaggccgagcgcttgcggaggcaggtgcaggacgagagccagcgtaagcggcaggcggaggtggagctggcctcgcgcgtgaaggccgaggccgaggcggcgcgcgagaagcagcgggccctgcaggccctggaggagctgcggctgcaggcggaggaggcggagcggcgcctgcggcaggccgaggtggagcgagcgcggcaggtacaggtggccctggagacggcgcagcgcagtgcagaggcggagctgcagagcaaacgcgcctccttcgccgagaagacggcacagctggagcgctccctgcaggaggaacacgtggctgtggcacagctgcgggaggaggctgagcggcgggcacagcagcaggccgaggccgagcgggcgcgcgaggaggcagagcgggagctggagcgctggcagctcaaggccaacgaggcgctacggctgcggctgcaggcggaggaggtggcgcagcagaagagcctggcgcaggccgaggctgagaagcagaaggaggaggcggagcgcgaggcgcggcggcgcggcaaggcggaggagcaggccgtccggcagcgggagctggctgaacaagagctggagaagcagcggcagctggcggaaggcaccgcgcagcagcgcctggccgcggagcaggagttgatccggctgcgggccgagacggagcagggggagcagcagcggcagctgctggaggaggagctggcccggctgcagcgtgaggcggctgcagccacgcagaaacggcaggagctggaagccgagctggccaaggtgcgggccgagatggaggtgctgctggccagcaaggcgagggctgaggaggagtcgcgctccaccagcgagaagtccaagcagaggctggaggccgaggccggccggttccgcgagctggccgaggaggccgcccgcctgcgtgccctggcggaagaggccaagcggcagcggcagctggccgaggaagacgcggcgcggcagcgggccgaggcggagcgggtgcttgcggagaagctggccgccatcggcgaggccacgcggctcaagacggaggcggagatcgcgctcaaggagaaggaggcggagaacgagcgcctgcggcggctggcggaggacgaggccttccagcggcggcggctggaggagcaggccgcgcaacacaaggctgacatcgaggagcgcctggcccagctgcgcaaggcatcggacagcgagctggagcggcagaaggggctggtggaggacacgctgaggcagcggcggcaggtggaggaggagatcctggcgctgaaggcgagcttcgagaaggcggccgctggcaaggcggagctggagctggagctgggacgcatccgcagcaacgcggaggacacgctgcgcagcaaggagcaggccgagctggaggctgcgaggcagcggcagctggcggcggaggaggagcggcggcgccgtgaggctgaggagcgcgtgcagaagagcctggcggccgaggaggaggccgcacggcagcggaaggcggcgctggaggaagtcgagcggctgaaagccaaggtggaggaggcgcggcgcctgcgggagcgagcggagcaggagtcggcgcggcagctgcagctggcccaggaggccgcccagaagcggctgcaggcggaagagaaggcacacgccttcgcggtgcagcagaaggagcaggagctacagcagacgctgcagcaggagcagagcgtgctggaccagctgcgcggcgaggcggaggcggcccggcgggcggctgaggaggcggaggaggcccgggtgcaggcggagcgtgaggcggcgcagtcccggcggcaggtggaagaggccgagcggctgaagcagtcggcagaggagcaggcacaggcccgggctcaggcacaggcggctgcagagaagctgcgcaaggaggccgagcaagaggcggcgcggcgggcacaggcggagcaggcggccctgcggcagaagcaggcagctgacgcggagatggagaagcataagaaattcgccgagcagacgctgcggcagaaggcgcaggtggagcaggagctgacaacactgcggctgcagctggaggagaccgaccaccagaagaacctgctggacgaggagctgcagcggctgaaggcggaggccacggaggccgcacgccagcgcagccaggtggaggaggagctcttctcggtgcgcgtgcagatggaggagctgagcaagctcaaggcacgcatcgaggctgagaaccgcgcactcatcttgcgtgacaaggacaatacgcagcgcttcctgcaggaggaggctgagaagatgaagcaggtggcggaggaggccgcgcggctgagtgtggcggcccaagaggctgcgcgactgcggcagctggcagaggaggacctggcacagcagcgggccttggcagagaagatgctcaaggagaagatgcaggcggtgcaggaggccacgcgactcaaggctgaggcggaactgctgcagcagcagaaggagcttgcgcaggagcaggcgcggcggctgcaggaggacaaggagcagatggcgcagcagctggcggaggagacgcagggcttccagcggacgctggaggccgagcggcagcggcagctggagatgagcgctgaggctgagcgcctcaagctgcgtgtggccgagatgagccgagcccaggcccgcgctgaggaggacgcccagcgcttccggaagcaggcggaggagatcggtgagaagctgcaccgcacggagctcgccacccaggagaaggtgaccctggtgcagacactggagatccagcgacagcagagtgaccatgatgccgagcgcctgcgggaggccatcgctgagctggagcgtgagaaggagaagctccaacaggaggccaaactgctgcagctcaagtctgaggaggtaccgccccctctacgtgcgacgggcgggtgggcccggggatctgctttggtgggtgatgggtgctcctgggctggcggtccctgatcacaccctcttcttctgcagatgcagacggtgcagcaggagcagctgctgcaggagacgcaggccctgcagcaaagcttcctctctgaaaaggacagcctgctacagcgggagcgcttcatcgagcaggagaaggccaagctggagcagctcttccaggacgaggtggccaaggcacagcagctgcgtgaggagcagcagcggcagcagcagcagatggagcaggaacggcagcggctggtggccagcatggaggaggcgcggcggcggcagcatgaggccgaggagggcgtgcggcgcaagcaggaggagctgcagcagctggagcagcagcggcggcagcaggaggagctgctggctgaggagaaccagaggctgcgtgagcagctgcagctcctggaggagcagcaccgggccgcgctggcgcactcagaggaggtcactgcctcgcaggtggctgccacaaagaccctgcccaatggccgggatgcacttgatggccccgcggcagaggcagagccggagcacagcttcgatggcctgcggcggaaggtgtcagctcagaggctgcaggaggccggcatcctgagtgcggaggagctgcagcggttggcgcagggccacaccacggtggacgagctcgcacggcgggaagacgtgcgccactacctgcagggccgcagcagtatcgcagggctgttgctgaaggccaccaatgagaagctgagtgtttacgccgccctgcagaggcagctgctgagtcccggcacggccctcatcctgctggaggcgcaggcggcctcaggcttcctgctggaccctgtgcggaaccggcggctgaccgtcaacgaggctgtgaaggagggtgtggtgggccccgagctgcaccacaagctgctgtcggccgagcgcgccgtcactggctacaaggacccctacactggccagcagatctctctcttccaagccatgcagaagggcctcatcgtccgggagcacggcatccgcctgctggaggcccagatcgccacgggcggcgttatcgaccccgtgcacagccaccgcgtgcccgtggacgtggcctaccggcgcggctacttcgacgaggagatgaaccgcgtcctggcggaccccagcgacgacaccaagggcttctttgaccccaacacgcacgagaacctcacgtacctgcagctactggagcgctgcgtggaggaccccgagacgggcctgtgccttctgccactcacggataaggctgccaagggcggggagctggtctacactgactccgaggcccgggacgtctttgagaaggccaccgtgtctgcgccgttcggcaagttccagggcaagacggtgaccatttgggagatcatcaactcggaatacttcacggcagagcagcggcgggacctgctgcggcagttccgcacgggccggatcacagtggagaagatcatcaagatcatcatcacggtggtggaggagcaggagcagaagggccggctttgctttgagggcctgcgcagcctggtgccagccgccgagctgctggagagcagggtcatcgaccgcgagctctaccagcagctgcagcgaggtgagcgctctgtgcgagacgtagccgaggtggacactgtgcggcgggctctccggggtgccaacgtcatcgcgggtgtatggctggaggaggcggggcagaagctgagtatctacaatgccctgaagaaagacctgctgccatccgacatggccgtggccctgttggaagcccaggccggcaccgggcacatcatcgaccccgccaccagcgcccggctgaccgtggacgaggcagtgcgtgctggcctggtgggccccgagtttcatgagaagctgctatcagccgagaaggctgtgacagggtacagggacccctacacagggcagagcgtctccctgttccaggccctgaagaagggcctcattccccgggagcagggcctgcgcctgttggacgcccagctgtccacgggcggcatcgtggaccccagcaagagccaccgcgtgcccctggatgtcgcctgcgcccgaggctgcctggatgaggagaccagcagggccctgtcggcaccaagggccgacgccaaggcctacagtgaccccagcacaggggagccggccacctacggcgagctccagcagcggtgccggcccgaccagctgaccgggctgagcctgctgccgctctcagaaaaggctgctcgggcccggcaggaggagctctactcagagctgcaggcccgtgagacctttgaaaagaccccggttgaggtccccgtgggtggcttcaagggcaggacggtgacggtgtgggagctcatcagctctgagtacttcactgcggagcagcggcaggagctgttgcgtcagttccgcacgggcaaggtcaccgtggagaaggtcatcaagattctcattaccatcgtggaggaggtggagaccctgcggcaggagaggctgtccttcagcggcctccgtgcccctgtgccagccagcgagctcctggcttccggggtcctcagcagagcccagtttgagcagctcaaggacggcaagacgacggtcaaggacctttcggagctgggctccgtgcggacgctgctgcagggcagtggctgcctcgccggcatctacctggaggacaccaaggagaaggtgtccatctacgaggccatgcgccggggcctgctgagagccacaacggctgcgctcctgctggaggcgcaggcggccactggcttcctggtggaccccgtgcggaaccagcgcctgtatgtccacgaggccgtgaaggcgggcgtggtgggccccgagcttcacgagcagctgctgtctgccgagaaggccgtcaccggctacagagacccctactcgggcagcaccatctccctcttccaggccatgcagaagggcctggttctccggcagcacggcatccgcctgctggaggcccagatcgccacgggcggcatcatcgaccccgtgcacagccaccgcgtgcctgtggacgtggcctaccagcgcggctacttcagtgaggagatgaaccgcgtcctggcggaccccagcgacgacaccaagggcttctttgaccccaacacgcatgagaacctcacgtacaggcagctgctggagcggtgcgtggaggaccccgagacgggcttgcgccttctgccactgaaaggggcggagaaggctgaggtggtggagaccacgcaggtgtacactgaggaggagacaagaagggcatttgaagagacacagatcgacattcccggcggcggcagccacggcggctccaccatgtccctgtgggaggtgatgcagtcggacctgatccccgaggagcagcgggcccagctgatggctgacttccaggccggccgggtgaccaaggaacgcatgatcatcatcatcatcgagatcattgagaagacagagatcatccgccagcagggtctggcctcctacgactacgtgcgccgccgcctcacggctgaggacctgttcgaggctcggatcatctctctcgagacctacaacctgctccgggagggcaccaggagcctccgtgaggctctcgaggcggagtccgcctggtgctacctctatggcacgggctccgtggctggtgtctacctgcccggttccaggcagacactgagcatctaccaggctctcaagaaagggctgctgagtgccgaggtggcccgcctgctgctggaggcacaggcagccacaggcttcctgctggacccggtgaagggggagcggctgactgtggatgaggctgtgcggaagggcctcgtggggcccgagctgcacgaccgcctgctctcggctgagcgggcggtcaccggctaccgtgacccctacaccgagcagaccatctcgctcttccaggccatgaagaaggagctgatccctactgaggaggccctgcggctgctggatgcccagctggccaccggcggcatcgtggacccccgcctgggcttccaccttcccctggaggtggcttaccagcgtggctacctcaacaaggacacgcacgaccagctgtcagagcccagcgaggtgcgcagctacgtggacccgtccaccgacgagcgcctcagctacacgcagctgctcaggcggtgccgtcgtgacgacggcaccggccagctgctcctgccactgtcggacgcccgcaagctgaccttccgtggcctgcggaagcagatcaccatggaggagctggtgcgctcgcaggtcatggacgaggccacggcgctgcagctgcgggagggcctgacctccatcgaggaggtcaccaagaacttgcagaagttcctggaaggcaccagctgcatcgctggtgtcttcgtggacgccaccaaggaacggctctcggtgtaccaggccatgaagaagggcatcatccgccccggcacagcctttgagctcctggaggcgcaggcggccaccggttacgtcatcgaccccatcaagggactgaagctgacggtggaggaggctgtgcgtatgggcattgtgggccccgagttcaaggacaagctgctgtcggccgagcgcgccgtcactgggtacaaggacccctactctgggaagctcatctccctcttccaggccatgaagaagggcctgatcctgaaggaccatggcatccgcctgctggaggcccagatcgccacgggcggcatcatcgaccctgaggagagccaccggctgcccgtggaggtggcctacaagcgcggcctcttcgatgaggagatgaacgagatcctgaccgacccctcggacgacaccaagggcttctttgaccctaacacggaggagaacctcacctacctgcagctgatggagcgttgtatcactgacccccagacgggcctgtgtctcttgccgctgaaggagaagaagcgggagcggaagacgtcctccaagtcctccgtgcgcaagcgccgagtggtcatcgtggaccccgagacgggcaaggagatgtcagtgtacgaggcctaccgcaagggcctgattgaccaccagacgtacctggagctgtccgagcaggagtgcgagtgggaggagatcaccatctcctcctcggacggcgtggtcaagtccatgatcatcgaccgccgctccgggcgccagtacgacatcgatgatgccatcgccaagaacctcatcgaccgctcggcactggaccagtaccgcgccggcacgctctccatcaccgagttcgccgacatgctctcgggcaacgccggtggtttccgctcccgttcctcctcggtgggatcctcctcctcctaccccatcagccccgccgtctccaggacccagctggcctcctggtcagaccccactgaggagacgggccccgtggctggcatcctggacacggagacgctggagaaggtgtccatcaccgaggccatgcaccggaacctggtggataacatcacggggcagcggctgctggaggcgcaggcctgcaccgggggcatcatcgaccccagcaccggtgagcgcttccctgtcaccgacgccgtcaacaagggcctggtggacaagatcatggtggaccgcatcaacctggcccagaaggccttctgcggcttcgaggacccacgcaccaagaccaagatgtcggccgcccaggccctgaagaagggctggctctactacgaggccggccagcgcttcctggaggtgcagtacctgaccggcggcttgatcgagcccgacacgccgggccgcgtgcccctggacgaggccctgcagcgcggcacggtggacgcccgcaccgcacagaagctgcgtgacgtgggcgcctactccaagtacctcacctgccctaagaccaagctcaagatctcctataaggacgcgctggaccgcagcatggtggaggagggcacggggctgcggctgctggaggctgccgcgcagtccaccaagggctactacagcccctacagcgtcagcggctccggctctaccgctggctcccgcaccggctcgcgcaccggctcccgggccggctcccgccgcggcagctttgacgccaccggctccggcttctccatgaccttctcttcatcctcctactcctcctcgggctacggccgccgctacgcctcggggtcctcggcctccctggggggccctgagtctgccgtggcctgaggctgcctgcgcccaccccgctctgcatgcggcccagcccggctcccaccgaggcgcgggggccgttttcaacgcttaaaggtgtcttcctcccaagtggtgcctaaagtttaaccaaaaagaccagactaatatattaatatatatctgctgtccagacagcctgtatcttgggggacagggctggcccagccctgctggccgcctcaccccctcgggtctcctcactcccttctacctgccactcacacagccaggtgccttggagggtcccaagctgggccccagcccaccctcctgtcttcccagggtagcccgcctgccagtcctagctgcacagggcagctgggcccaaccctgtctgtagagggccctggtgtttctagcactggcctgcacggtgggccttgctggggacggggggccccagtcagcctctctcccagtctacccagagaagccccttccccatgggaagacgaggccctcgggcccagcccccacagtgctgtctgatctgtgctttccagctcaccccccacactcactcctgagacccctggcctccggcgtcagcctccagcctctgttcccctagtaagtgccttccatgtcggcctctaaccccaggccccgaggacccagacccagtggggaggcggacgttccagccggcatggctgggaactgcagacctgtcctcctggtgggtccaggggcccctccagcttgtggagccccacactggggtgccgcctgcccgtctctctcccatggagccccagccccctttgggcccagggacaccagccaggctctgtgctgaccctcctgttgcacccagccctggtctcagcagcgaccacccctgcctccaccctctgagctttgcatgttccactaaccccgggcgggtggcaggtggaggtgtcaggctgctggcgcctctgcaagggcagaacactaacctgaccgtgggcggggccttgcggtatccgcccccaataaaagcaattccaacctt

SEQ ID NO: 21 - DNA, 70999 bp, Homo sapiens
agctcccctgcaccggcgcgagctgcgggcgctgcccacgtcaggctctgcagacaccagacagaaaaggtcttccggccagggagcgtgggggaaaccctgtggggccgcgcccgtcagtgtcaaggaaaaacggagaggaaggcccttgcctccagggccctcgcagcagaattctgcccggcctgccaggaggccagcggggcacgggctgagggtgcaggatccggagggcgccgcccgcccctcgggcatcgcggggcccagggtccgcggggcctctgagctgaggcggtccaatgtaccctttgtccttcctcagattcattatgaaatccgaggcagtctgggcgactccagcggcgttcgcccgccgcagcctctcgaccgccggccacccgccagccacgcgcgcccagacaggagggcggccgggcgctcggcggggcggggcctgccgggggcggggcctgcgggcggggcggggccgcgggagggcggggccggcgcggcgagcgcaccagcagcatcctggctcagccgcggcggtggcgggggcgcaaccagcgggccgaggcggcggcgccagcggcgccttaaatagcatccagagccggcgcggggcagggagtgggctgcagtgacagccggcggcggagcggccggtccacggaggaggtgagtgcgcccgccgtgcggagccgcgcctgctcccgcggcggtgcccgggccccggccgaggcgccggctgacgttgcccttcagggccgagcccggagcagcggccgccgcggaggcgcgtgagccaccccaggctcgtggggccgcgccgcctttccggcctcctgcccgcggccccgcttccctcggcagccggaggcctccggggtgcccgtgctgccgcagcttcctgtgtctgagtcgcgggcggcgcgggcgcggggctggtgcgcggccggggatgcgcgcgggaccgacccttgtgtgtgcggcggcggggaccggcccggcgaagcagccggaggccgcgcttcggctgggaggaggtggcccagctgggccgctgacgttgccctcgtccgcggcccccgcctgcccagaggccgggctcgcgggcgttcggaccgcgcgtggggcgagactgcactcgcgcccgctgagatgccggccccacgcagcgcggcggcacgaggcccacaggcagctcagaggccgctgccagaggcagacattctctcggtgactccagaggagtgcccgtggcccttgcacttggccgtggagtcattgatctaaggagtgctggcattttttgaaattgagaagcaaagatgatgtctgtcacctggcagcgtagacggagagtggcggtagatgacttgaatggacacgtggattcgagtctggggacaggcgttcccccagtcggtgcgttgtgagagtgtggaaaccccttccccactcagtccaatttcaaggttatggagcataattaagagtgaccattctaaaagcgttctctagtgccctggctaagacttttaagcttcttggtgcaggagtgtctaaagtcccgcgactctcactgccctgtcttttattttcttgacctttgattagcgttgagagaaactggttaaatcttgcagtttctgccacccatttcacaacttaacctgtgattgtcccaaagaaaacaattattggcttcttgctagcaaaaaaatcaaaggcttccggttgattgtttctttcttttttttcttttttcaagtggacgtggaaggttaggctggctaaaacttaaagtttgagttgtaggtctgtgctgggtaggcttgagaagatggagctttttaaggaaccattgctcgccatcagattggagccagacagtgcagtgtgatatagtggaaaaggaccaggtcttgggagacttactttcttgttctgactcaactcggaaaacacctccctagtctgaggcccccctccttatatttgtgaacaaactgcattagactaaaatctttcacgagtccaaattctgcgactagaaaaataaacttgttagccgcacaccttatacctctcccctttaaaacagacatattaaagacttctgttttctgaatttactgtaaacagaatacttaaaaaaaaattacccagacaggcgtggtggctcactgtaatcccagcactttgggagaccgaggcgggcagatcatttgaggtcaggagttcgagaccagcctgaccaacatggagaaaccctatctctactaaaaatacaaataattagccaggcgtggtggcatgcatctctagtcccagctactcgagaggctgagccaggagaatcgcttgaactcaggaggcagaagttgtgatgagctgagatcccgccactgcactccagactgggcaacagagcaggactctgtaaaaaacaaaacaaaacaaaaaattacccttccccacaattataagcattttggcatatttccttcctgtctctgttgttcctattttggcagtatttttattgttatcgcaggcagcctgactgaaaagaaatctgggcttctaagtttttggtatttaggaggtagatacaagtgacccatgcatgtagggttaggtatctatttataccatgcaggtagagttttcatagccacctctacttttgggtgaagtttaggctaactgaaagtgtaccagcatgcatggtgtatgcagaaaaatgaacgtaattcagattatgtgatagttttctcttgttgccattatatataacccagggcttaccacaaactgaaatttcttatgcattgacatttagcatttgatgtaaaatgactatctcagagttgctgccacaaacactggtaaaactgtccctactttctagcatgcttaatgtctaggtcttgctacatcttttttgatgtaactgttttgtggaaaatggttgtgtgtttggggaggcttttgagaaaagataaggttgtcttgtcattataactgggtatttctcctctctcccttccagtttcacttgtctggaaatagcaagactataggagtagtaatttctagatatttatagtcagtaaccttagaggaatgtttagtttttaagatcaattgaatttattgtgtaagtttgccatttaaaacaggtgcccatttgtgtttactgtctcttgtaaccaaactctgttcaattagaatccattagtaatgttttgtggagagtcttgtttggatgatgcagtgcatgaggctcctgtactacaaaatagaaaagaagttcctctaaggcagctcaaagctgttgatatcctgaagcctttttaggcctccctctctgacaggcggtgatctgacaggaggtagataaaggtgccggagtttttagtgaaggttggcagtccaacttggtagtcagacaaacacatgatggtcaaaagtgcctttgacactggggcctggagaagaattctcagtggccagagctgatctgaagctgcaggcagttgagtttgagtttcaacatgttggtacttcaaggggcttctgaaaagttttaaaggagcacaagccctgaaggagtagctgaacttagtgaactggagaaggcaggggcagttttaccagggtttgtggcagcgactctaagattgtcattttacatcaaatgctgaatgtcaatgcataagaaatttcagtttgtggcaagccttgggttgtatataatggcaagaagagaaaactatcacataatctgagttatgttcattttctacatcatgacattttcactttcttttttttttcttttttcccagataaggtctcactctgtcgcccaggttggagtacaggcatgatcatggctcgttgcagcctctccacctccctgggctcagttgatcctcccacttcagcctctccagtagcttagactacaggcgcacatcactatgcccagctaatttttgtatttttttcgtagtgaagcggttttgccatattgcccagttgtctcgaactcctgggctcaagcgatttgccctccttggcctccccaaagtgctaggattacaggcgtgagccactgcacccagcccactttcatgttcttgactgtgttagaaacaacacagtattgattcacttatgacctttgaggaatcaagaggggcgggtgaaatattggagactccttgaagtgtggctggcttggagggtgtcacccttggacaaaaacttaagtggaggtgagtaagggccctgctcccctgtgctgcctgccttagaaggatgtgatcatctggaggcaaatagcttgttgcttgaggccaggagttcaagaccagcctgggcaacagagcaagaccccatctctagaaaaaaaaaagtaaaaacaataaaataaaatctcaaaactggtggttccatataggtgcctgggctgattctctttatgaattatttgctggtcttcaagtttaaataaaattctgaaagctgtctaatatctaaaaaccacttgccacagaaaagctgtatttgtttttcatattttaagagtcatacatacttactggagaaaatttgggaaataggaaaaatgaagctcttccagagattaaatactattaacattttgttatatttccttccagtcttttttccctatacaataaacaaattttaagcatacattgttaattaaagattacaattttgacaatttaactttatcacctaagttatattgtgggcttttttacacgttgttacatattcttcaaaaaataagttctgaagatgactgcattatttgctgtatgggccataatttagttacttctccccatttgttggatatttttcagaacagtttaccaacctttgttatatgtttaaatacgtctttaaaaaataaaaaatgttctgctttaaaactcttgaaattaacaataatttgaaaagtgtttttactaatgaataggtttaatggacttttgggttcatgtattctagtcaaaagcagttgaaatagggatttcatggtttggaaagagaaatggaaagaagttagggcatcagaggaggaaacggggcctgcctgtagaccatttcctcattctggaggggacttctgataaatgtaggctctatccattagcacagctttggctgctatagaaatgggcactttccccttaggtttgttgtgggagaaatgtccatataagaaggactgaaacactctgaatactatttattcctttattaagcagagtcatgagaaagtgcttccggagctagtttctccttcagggtccaggtgtctgccacaaagcagggctgtggtagctgaccgaggtggtagccacagcctggacacggccaggcttaggaacagagcagtgatgagagcagcagacagagccaggtgctgctaagcttctgatgggttaactcattagtaccttcagcaaccctgtaaggtaggtcctgctgctatccttactgtacacaagataaaggaacaggtgcaaagattaagttccccataccagaatttgaacctaggcagtctggcttcagggtctgtgctcctaattgctgggctctactgcccctccagagctagaagttctcactccaggagggcctagaaagttccaggttaggccaggtgcggtggctcacgcctgtaatcccagcattttgggaggccgaggcgggtggatcaccctgaccaatatggtgaaaccccgtctctactaaaaatacaaaaattaactgggcgtggtggtacgtgcctgtagtctcagctgctcgggaggttgaggcaggagaatcgcatgaacccaggaggcggaggctgcagtgagccaagattgcgccacagcactccagcctgggtgacagagtgagactctgtctccaaaagaaaaaaaaagaaagttccaggttatacagctggcagtaagacaggaaggacagagctgggtctccttcggtgtcactgctccttgattttacccccatctcatttacactctgccttgaattatctctttataccactagagtgctgaaagagaccacaaattttgattcagcgtggctcagggagtgataagatcacttgctatgtagctgtgactttctagagaattaaaaaataaaaggctttgcctgccctggacattggtcttgtaaggctggagaacaattgagacgcatgactggccgggtgcagtggctcacgcctgtaatcccagcactttgggaggccgaggtgggcggatcatgaggtcaggagatcaagaccatcctggctaacacggtgcaaccctgtctctactaaaaatacaaaaaattagccaggcatggtggtgggcacctgtagtcccagctacttgggagtctgcagggatcggaggggggtgacttggccaaggtaacacaacctgcctgaccctctggccatgcacacgtgtggagtttgttcccgggccctgtgcctgttcaaagaatggctggacgtcggtattgcccttggtttctgccctgaagtccagtcagtcagcagttctgcttattctgaccctctctgtgcagtattacccaacacacatgcatttcctccttgccttctcagtattgccatcgtgaaccagaattgtcacctccaatttaaacagtgaaggcctttgttaggaagaggggcagggtgcagagggggatggttgctttttctaaatcacagctctgatcaaatccctcctaagcagaagccttccaggctcccctccataaggctccaggtgtttacttaccttgcctgtcaggggcttctgcagcttgcttcctacctgctatctccactcctctccaaaccaccatatcctgaggcttctagaaagcaaactctggcggcatggggttaatgggtctgtgtacccaagacactgtacctgggtgctgtcatctgcctgactgaccttcctgtgtcctggtccgatggtgtctttgatcctatagctaagatcaagacactgaaaatctctagactcaagtctgtgcttttgctgggataaagtttgtgttgagtacatctaggctgggtgtggtagctcacgcctgtaatctcagcactttgggaggccaaggcaggtggatcatctgaggtcaggagttcgagaccagcctggacaacatggtgaaaccctgtctctgctaaaaatacaaaaattagccaggtgtggtggcaggcgcctgtaatcccagctactcaggaggctgaggcaggagaatcccttgagcctgggaggcagaggttgcagtgagccaagatcgtgccattgcactccagcctggggtatagagtgaggctctgtctccaaaaaaaaaaaaaaaaaaagtacatctaaatggtacgatgcccatgttggcctatttggaatgccattccttgtcccacagagccctgctcctcagaggcacttttcctggagtgactctccccttcctcacctacactcactgtcattcagctgtagatgcaccagcgatcatgctagtggttaaaatatcgaaatactcccatcctggctagagaatagctgctacccaagtgcccccgcccttcatatggaaactaaagggttaatacatggggcagtagaggaactttggagccctgttttggtgcactggcctgtgtcttttctggctggttggtgtctggccgtactggctattaaatattttgatgagcatcccagcctctgtcccacgtgcatcttttcatgagtgcatatctggcttccacagattggcaccccagccacactctaagctctgggcacatgggagacctagtcattgtcatctctgtgttttcagcagcgtttaatacagggccttaccgctagtaagcatgtaagattatctaatgatggattgagggtagggcaggttccgatggtcagatgtcccatagaaggtggtccctaacaagaatatacattgtaatgttccaggtttgtctattctgatactgtgcaaaacgtagatcttatagccaagatcaaggcatcgaaagtctgtggacctaagcctgtgctttcactgagtgaagtttgtgtttcggagtacatctgaggtgtttctttccgtgtagtttcacttgtgttggagaagcaggtggctgtggtctttgcagggtgtgagaggggaggagattagtgttgagctccagctaatgttacataactctactgtagtcttcctttacctggtattcttgtgttcaaattgccccttgtttctgtgccactagtgaaatggtcaaatggctcattgttccttctgtaggacagttacctacattgcgcctcaggcaagcttctgaggcatcccaggatggggagctggcgggggaccttatctgtcaagcagcccagccaggcacctcacagtggacggaactgagttcttgagggggtggctgagcagcccagactcccaggttagactctgaagacagccagtctgtgcttttctctcctgatgtgagtcagaggcaaactctgccgatgccaagacctccctagagttcaggcagggtgaagatccttgtccttggggtcagggctgaagcttcagggtgtccaggacagaccttcagaggaggccagccctggagcctggcgtgggtctcggcctcaagcctctctgtcctgcagagaggccggctcagtctcttcaccctctcaggcaggccaggcgacggtcaccagtagcgtcctgctctctctggcatgcttcccttcatcactgggtgatgctgagtgtcttttcctccctctttgatgtgacagtccctttttgcaggcttttgcaggcactgtccctctgcctcccaggtgtggcacgcatttcagggtgcctccattagcagtttcatgcattgttgcccatggtggggaacagatggagacacaaggcaggcaagccaccaaagaggctgcagggctgctcaggagatggaaggactgtctccagagtggggtgtatgccccatagtggctgcctagaccatccattagattgtagaatagaatagaaacattagaacttctatggatagttattttttggccatcttttaaattcatatttgtgtgttttctaatggtcagaaaatacttgtatatggtttatagataaaagcatttaatgtgaggggtgcatttatttattggggtacatcatcagaagtctagagaaccagaaagttaactccttctctagcaccagtatcatgagagacctctgaatgccattttttaaaaaggaaagaatttgtcaattaaaggggaatagaaactgctctctggctaggttgtgattcatgtcaaataggcctgtgacttaaggagagtcaggttaactccagagtatgttttgtctctggtcccaaaacttagcagtgtggaagcctcattgggatcagggttttatttttttctcttttgtttactatcatatcccctgaggctggagctgacttgcatatcctcaatatttgcaaattgaatatatgggcgtttttcttgcatgataattaagtattatgctgagttggatgcttcaagtcaatattcaggttgcctccttttgtttaaacctttgggcagttggcaagatgcagcctacatgccagtcagttttactgtcctgcacatgatacccccacgcggtagaaccatagagccgtggaggcctcagaaatgtcacctgagagacagggtgttgggatgtaacttaaagtaattttttaagaagtgggtataatgaaacagcaaaacgttgatcattactgaagctgaagttggagtcacgggtacataaaatatagttttattatacttctgtgtctacttttgaatagatttgaattttcataataaattttaagtgaaacataaagggaatatagagaccccaaactagtatcacccattccgagcaggtaatggccgaactgcatagtctctttttctttctgtcttttaaacactggtcattattctataatcttctgcaacttgttaggtttgttttgattttggcttccccagagccagtcacctctttttatagttacctgagctctttgtgtaattttagctcatgtctcgtggttgtcaccagtacctctcttctccttcccaatacgatgagctaaatcctggttaaccttttccctatttcacttgttgcttcctccaacaccactgaggtcttccacatgacaggcacaattcagaggccagaacagggtcccatgttttttgcaggctgcgtccagtcctggggaacctcatagcctgtgattatcttctagattccattcatgtctgcttttttttttttcttttggatggcgtctctgttgtccaggctggagcgcagtggtgccatcttggctcactgccgctgcgccccccacaggttcaatcgactctcctgcctcagcctccgagtagccgggactacaggtgtgtgccatcacgcctggctaatttttgtatttttagtagagatggagtttcgccatgttggccaggctgggcttgaactcctggcctcagatgatccacccacctctgcctcccaaagtgctgggtttacaggcatgaacctgtaaacctggcctcatctctgctttttaaagtaacagcaggtacctgttgaaatctgtaaaaactcaactcagaagtggatttctccaaactcgtgagaggctgatcttcttctccctgggcagagaggtctttgtgtcctgtcttctcacccgtgtcctgctaagccatttctgtggttatcagtctctgaaaccttggtctattttaagaggtgtgagtaactctacccaacctttgccctttttaaccttcttatccaggtcactgatatgtgatagctgtgacctctgcgagctgtggggtgctgtggactccttgaagacaaggactgggtcttactcttcccagtttccccccccaggcctgggtcctggaggggacaggagggctctgtgaactaaacacccactgggtgagggcgagcctcctttagccagctgtttcttactcagccaagacattgacaagaatgctgtcatgggagagagagaggcagaggctcctgacggttgccttacaatgcggctgcgagtccccagcccacctgccgctccttcagggcctcctccctgcctctttgctcacagcactgtctggctgttgctggtgtttctccacccactcctgtctctgcctgttcagacttggcctggttccaccctcagctctctggacagccctccctcggatgcctggtgcatgcgtactgttttctccctcccctagattcctggagcaccagggccctacctgccgtggttatcagatctgtcttctgtagctctgttaactcttgcaggtgtgtttgtcttcattgatatcctaaacttgctgaaggcaaagaaaaccttgtaagtattttatcctcaggctttctgattgtcaggaactaaggagagttggttatccccctggaatgttcagagtgttgcttctttttttgtggtgtgactcctttttcaaagaggcacgaaagtggaagtggctcacatagcaggtcagtggctgagccgggtccagcgtgggcagacggggcaaagcatagctacatattttccaggaggggtttatatcctatctgtcattctgttctgaggacaggtcactacctaaatccttcgtggagcaggtgggaaatacataaatacaggaggacattaactgacctgactcacttatagcttctttatctggagaaacttttaaaaatacagctaatagttaggatggcaagttttatattaatttttccatagtaaaaaattgggaaaaatacagcaacatacaaagaacaacaacatagtagtaaaaacacccatagactcgccacatagaattgaaggttttaacattgactcttttcttcatatatcactgttccctgggggttttgggtattaggtggaaacttgattgtttagtcctggacgccaggattgtgtggccatcttttcccttctcttacatagtcttggagaagctaccatgatgttcatgatggaaagaggcgtagctctcctctgttcccactctcctttttttttttttttttttttttgaggcggagtctcgctctgtcgcccaggctggagagcagtggcacgatcttggctcactgcaagctccgcctcccgggttcatgccattctcctgcctcagcctcccgagtagctgggactacaggagcccaccaccatgcatggctaatttttttgtatttttagtagagacggggtttcaccgtgtgagccaggatggtcttgatctcctgacctcgtgatccacccgcctcggcctctctaagtgctgggattacaggcgtgagccactgtgcccagccttacatgttcatattctgtttatttccatagtcaccacgggaagatgggaagatcctgactttgggcagagcacctgagaggaccccaggatctaggtaccttctctgcgtgcagtttctcaaacaagtggagcttcctctccatccatggccctcggaggaggaaagtgcctgcatagcttggggccagctctggctactgtgaaaggacatttgatcctctctgctgttcagttgtgctctcttctcctggtgtggtctcttgcttcagggcttactttgtggttagctgagtccagtaaggtgaagagtcttctggattatttcagtggcaaaaagccttttatttccttctttagctttcgtaataacaggccgtgcttgtcttgcctaatacccttagaacatgctgtcatgttcttcaacttgcggtcatagagacacaattccgactcttcctgtgctgaacatcagctgaaataacatgccgtattgatccagttcatgagtgagaagtttagtctacacaagccttttctgtcttgctctttgcagaaggattgcgtcagcctaaaaagcggatctttttgtctccatccgctgccacaaagctgttgacggaggctatctgcccaagttggctgccttctctagctcttatcagtaaacttatctgcctcattgtgacatatctacaacagttgcttagccttattcaatcagtattggaagacaagtggaatcatctttcttctcataggaaattttttgaatggaaacttgccctcttaaatatgtaccgccaaaatttagccctgctgtcccacgcaaaggctgtacatgacctggatatcgtcatggggcatgtcctaactataatcatcattttctcaagtggatgtacatgacagatctttgcagctgtgtgtgaagagagaagggaggagagctatatgttttgttttgttttgttttgtttgctctggagaatgttgggcatatcctgttgtcagcattccgtacatctcaggtggccgcccactagctctgtgtttctgggagcattctcctcactagagccctcgcgtgggactctggatcttgtgcttgagtcttgtctgtttccctggtttggaagattctcttttctgtcatagaaaactcacagaagttggagtccagccctggtatggggctctgggctcaagcctttctgatatttgctgttttacttaagaaaagtacttatttgatctcttcccttcccccggggcagccttgatttgttttaaatgaatcatcagtcgtctgtccaaatctcactgtatctcagcgtcttctaaagacagtagcccttagagttgatggcagtcttgggctgacattctacataagtgaaacaatttgagaaatataaaacatgatcaaaataagagcaagagaatatttttatgtcccctttacatcagtggctcgcacccttttctttttcccccagtcagccaggagatgttctctactcctttctggtgtgcggtgtaggagtctggtggcgggtagaaggagactactgaagttggaaaatgcttaataccccctttctttttggagaatcactgttctatgaatatatcctcaagggacttgctgcagagacacagtcagaatcacagagggtctgacacggtcagaatcacagagggtcattcatgactcagtagatgtttgttaagcacctgtccttggctcgggactgtgttaagaaccaagggcatataaagacagatgggaggagaccctggccggggagaggaagaagcatctacataggtactaagtaccattcgctgtaagtgtaagacaggaggtgctaagtaccacacaggggttacaaataaagaagtcctggagttcagaggaaggactgattgcttctcatagaggggattgtgtaggatttctgggtagttgtggaaccgccgcctcctcccacatgaaggagggccctgaggaccctggaaggttgggccggttgctcacaaatcaccctcctgtctcctcctcccagtgtctcttcagtgttttgccattcattctcaggctcaaaattacttctcttttgtccatttgtatccacttaagcaatttttaaaaataattaaactttttttattgtggtaaaatatatataacataaaatttgtcatgctaatcatttttaagtatacagttacacagtggtttgaagtacattcatagggttgtataaccattaccaccatctagttccagaatgtttcgtcatcccgaattgaaactctgtgcccgttcagcaataacgctcattcctcctccccctgcccagcccccagtaacctctctgctgctttctgtctctgtgaatttgctgattctaggtacctcctagaagtgagatcatgtagtatttgtcctttgcttcatccatgtcatggcatgtatccaaatttccttctttttaaaggttggataatgttccattgtatagactacattttgatccgttcatctgttgttggaaatctgggtttgaatcctgggctcttaaagcattgtgcagctgggcgcggtggctcacacctgtaatcccagcactttgggaggccaaggcgggcagatcacaaagtcgggagatcgagaccatcctggccaacacggtgaaaccccgtctctactaaaaatacaaaaaaaaaattagccaggcgtggtggcgggtgcctgaagttccagctactccggaggctgaggtgggagaatggcgtgaacccagaaggcggagcttgcagtgagccgagatcacaccactgcactccagcctgggcgacaaagtgagactctgtctcaaaaaacaaaacaaaaaaaaagcattgtgcatcgtggcttgtcattgtcagtgtcacctatgccctctgtttagacttgaacacccacgcacgactgggctgatgtgctcagctcttgaggtctgtgggctttggcttcagacccaggcactcatcctgttctcatgtggaactagggcaggacatttgactcctgtacagtttcctgatctttgagctgaaggcagtaacaaccccgtgcagtaaggactgtgacgaggacgcatttagccctgtgcgcagtcccgtagcacagcacctgacacacggcaagtgcttaagcacagtggctcctaacaaactcataactaagcccatttccccaaacatcttccttcccctttcctatcctatcctatcctatccgcttgagccctatcgtttgttccagattaatgtgcgaaagtgcgagccctgaggtcaggaggcacttctagtagccttgtctctgtccctggggcatgaaggatagctcattttcccagatgattctcatttgtcaaggaccagctcagctgtgccttctccatgcaaccctccctaagagcaaatgctccctgtcagaattcattttgcacttactgctactctgttatccactattttgtgtatacatttatgttatgtcttttaattccaagcccaatataagattcctgtcccaatataagatgaaagtgtcccaaaattctccttcagccttcctagttaagtcttaccaaggctgtcatagtatgaggtgctctcagcccctgtatttggaacagcctcggggagagagggcaccttgtcctgaaaccgtctctaccagtcctagtcatgggtccttgtacaggtcaactagctgaattagactttttctacagcaaatgtaatgctagctgggtaattatttcttagggtttcagcttacaaaggcaaatgttggttgttactgtaaaaagtgcatttaaaaatcagtttaaaaagctataaatagagtatgaggtttagttagataaatgtggacccataggacaaaatttctcctgttctaatatcattcaaatgtgttcttgtgacttgggagaattttttcactagtagcacatacatgacttcaaaaactgcttcaatttcaacaacttcagtggaagaggaaaatgtgaatgtatgccacagaaaaccattcgatgcctcaaaaagtggctgtagagatgccccaaaccctgtttgaagatgcatattcaaagaactcaaataacatattaatgaaatgtggtttatttgtttattttatttttattttttttgagacagagtctcgctctgtcgcccaggctggagtgcagtggcgcgatctcagcttactgcaagctccgcttcccaggttcacaccattctcctgcctcagcctcccaagtagctgggactacaggcgcctgccaccacgcctggctaattttttttttgtatttttagtagagatggagtttcaccgtgttagccaggatggtcttgatctcctgacctcgtgatctgcccgcctcggcctcccaaagtgctgggattacaggtgtgagccaccgcgcccggcctaatgaaatgtgaatttaaaacagtatttctaaagtaatttagttcttcatgtgatttaactggagatgtagtttaatgaatacagaaactgctataagatatttgaccctgcatcctaaaaatttatctgttcaaattcgacatattgtgtttgagatctctttattttggggggcatatatgatatttgtgaccaatgtgaatggttgaggtatggtcctcattttactggttaacagttcaaagctttgtgtctcactctttctctgataactttataaggggatgggcagggagtggtttaagtgtagaagtattcagctggacttgaatatttcaataagtcagattaataaaatcagggcatctgctttgtttcttctttttacatccttaggaaattcaattggtgatctataagatcactttaatgaaaattaagtgggtttaagatttattatacttaattgggaagaaaaagccacaaggcagtgggtgggaataactgactccctgtggaaccacttgcatgtttgttatgggatcccaaagttaccccaaatctttctcctgatgctcagagtgaggagatgggcccagagcagtgaccacagtcagggagatcagtgggatagggtttggacagcaacctctgctttcctctccagctgggagactggcatctcttttgagctgccgtacctccctctctctagggagagcctgactgctcttttggttcaaaagggaatggcttaagcaaatctaactttagggaatttgccaagccagggttaaggagcacgaatccaacaggtttggagtggtgctttgaaagagcagcaaatggcctggctgctgctctcttgttcctccctgaagcctgagctctgcccagctagtgaatgacaaagggggcgctttcagcctctgtaaatagcctattgtacaaggggaggaggcggggcacggaatggcagcatcttgccagcttgggttgctgcgttaaggaaagatgtcaggctttcttaatttgccactgcaggggcaagggtgtcatttatgtgggtttgtttgagggctgcattcctagtgaagtattccatcaaactgccattattcatcttgatgaaagcttgaggaactttagaaggagagaaacatccagaccacccggtttttggtttctaaatgacatgaagagaatacaatgttaatgtaagtaaaagtttgcagagttgcaggggcagtgtgtgtgtgtgtgtgtgtatgtttgtgtatgtgtatcttcaagagaatgatgtccttgtgagtcacctctggccctgagccactattttcatggtacaaataaaatggtgaagaggtgaacctttgtgtatagtgggccttgaactcaccacgtgttcagaggccagggtgatacaataaatgctaacgtttttgtaagacattgagcatttaggtggacctcaggagggagctgtcataatacctgggagtgtgagtactggaaggactttagaaacctgacctcatggttcctaacctgggttgggctaaaggagacttgtgatagttatgtgtgttctcaggggagagggtcagtggcttagcatagttaagaattattagcataggttggatttagagtcacattggttggtgtcccgttcttgactaacatcctggggaaggcttataagtctctggccttggtttcttcctcatcagtttgcttttgtgatgttcagataagacactggatatgaaagcctttccaaaacactaagtaaatgctaattgcatttttagttctatccaaagtttgggtagacgggtaccaggattttggtttctgacagtccgtgcagttcagtttccatcaccctgcctcgctatgcctgtctctgcccaggtctatttaaaggaatctcctgtgctggatctttacactgggcttgtgcccagatttccttggccattgttaccttccccatccttctgtggttttagactccaggtttacagaaaacccagctgagcaaacccactttctgtaagagtggggaggagggtgcacaggagtggctgtagaggaaggagaagctggctgtcagtagccttatgtgttcccagctgggaaatactggctccttaagcctttaagccaattgaattatatttttggcaaacagcggcatgatttacatgcccaggctataaatttccttagatgtttatatggaaatttgattttgaaagaataaagaaatattcaaaccagaacactactggaataagaatacaatctgtctgagttttaccatttgttagcaagtgtatgagtcttagtccttcttagagaccccttagtctaatgcttatgttcacatacagcgttgaaagactatttcttgtgcctgattttctttggatgtaggtgtacctccatttttaaataccccaagtgccttttccttaatagcagttaatagaagggaaaagatttataatgctatcagtgtctgtttaagagttgttcttcacacatatctaaatgagctattgtcttagttctttatgcatagactatagttttcctatgtatagcattaatcagtttgttcagtgaagttggcttgcagcttgttacctggctgccatttaagaggcatgaattaaactgctatagtttgtcattatcacccactaaatataggaatttggctggattcaaacccttagtattatagattagtatctaatgaaatgttcttgtacacatgctactaaatatataattttctgaagttttttttttaaagtgttctttcttagatttaataaactttcttggtgtaaagcagtctatagcatggctactgctgatgcttaaaatagacaaattaatcccctgtgtctgactgtatttgtttacagaggaattatttaagattctcactcagggatgtgatcctgttgaacagcacctgcaaattcacacaatctaggttttatgggagttactctaggagctttggggagagaagagagaaaggcatggcagtgtgtgtcggggtgagtacttcctattcaggcctggagtgctgcagggtgatgaagacaactagaggtggaaggatttgagggcaaggcaagtttgcacattatattcccaaggctgctttgaggttgtggagttgcaatactgtttctgaaatctgaacactcagtgtcaataggacatggacttgatttgtctgcttatcccgcctggtgtacatcccttcctcagaaaggccttcccccgtgccttgcagaccttgcttgtttgatttttatcttccctgctagaaggttagcccactgaaagcctagaccaggtcatcaacactgtcttcccagcgcctggccaaagcctggctcacactaggtgctcagatatgcagtgacgggagtagctcaattcctatgtattcgtctagaataaatctgctgtcagcatgctctgggcaatctgtttctttcttggtatgccttaccttggttagacataccacccggcatcctatccttcatttcagtggtttaaaaaatatatgcccgttgtctcttattgggaagctgagcagaaagaaaacagtgtctgttttcagaaccggtcctggcagcaacactcactgatgcctgtccctgcccatgggtggagcagtggggtgactttgctgctggctgcccattggcctatcctccaccctctgctctcctgagaagtcaagtgtggattttgtctgctagttacctttagcccagtgggcagcagcgtggggctcggcatgtgacttgtgccctgagagaccttggtaggctgggggagcgcagctgagccctgctaacccccgcccacttccaggctcattgccctcttctgtgtctgcagtggggtgtcacctagtagtcagctgttggtggcacagatggtgagtggttttgttaagtgctggtgccttctttccagaaccatggcctgaagaaatctgcttatctgttctttctttgctgtcatggtaaaccttgaaatttcgtgtgtgtgtttgtgtgtgtgtgtgtgagtgagtacacttacatggattcattgtagcagagattgaatgagcagagcaaatacattatgttggttctggtagtattaatggcctgtaaaacagagaccattaaatttaaaattaatttcatttaaatttaaattttagcagaaaatttctgtattttaacaaagaaaaagagatgcaaatcaaaaccacaatgcatttctctgatgaccagtgatgatgagcattttttcacgtgtctgttggtggcataaatgtcttcttttgagaagtgtctgttcatatcctttgcccacttgtttgttgtttttcttgtaaatttttgttttttttcttgtaaatttgtttgggttctttgtagattctggatattagccctttgtcagatggacagattgcaaaaattttctcccattctgtaggttgcctgttcactctgatggtagtttcttttgctgtgcagaagcttcttaattttgtctgaacactccttgtaggcagtgtttttacctgcgtgctttacttgttctgcactcaggatgaatcacagagcgttggtagaggaaataatcataaaatctaatatttttgagcactttctaacgtgtgtgagatcattcttacctctttatgtgagtcatttagcagtcagaaaagccctgcgagataaggtgctatttccgtctccatttacagatgaggaaactgaggcacagggaagggaggtcatatgtcccaaatcatacagctcatatgccagggaggcagaatttggctctagcatctagggtctttttttttttttttcttttttgagacggggtctcactttgttgcccagattggagtgcagtggcacgatcccggctcactgcaaccctctgcctcctggattcaggcgattctcctgcctcaccctcctgagtagctgggattacaggtgtccaccaccacacctggctaatttttgtattttttgaagagatggagtttcaccgtgttagccaggctgatctcaaactcttgacctcaggtgatccacccgcctcggcttcccaaagtgctgggattacaggcatgagccaccgcgtccggctgcatctaggatctcaaatactattctgtactttctttccaacactgtgctgtattccctctttagatatctggtggttggtttaaagtttatgcacaccaatttatctgtttgtttcttttggctataatgtcttggggagtgtaaaagaaactcatcttaccagatagccaactatgggtttcccagcatttatattgccactgttgtcgtgtgaggagtacagaaggtgaaatttacattggtgtgtttaaccagtttgggaacttgttctgagatctgttggaagaaatagaaactgatggcccttaggtggtttgggcttgtacttccccttcactcatattcccattagccttgacaatgagagtcgagtgtttttgattaggtggatggacgagagcagagacgtagtagcaaagaagaaaatagaaacttaaatctacttatttgagtttttatgggaagaattcttcttgagtaaaatctttttaatatggttaatgaaaggaagagaatggggttttttcaatacaaggtaatggagaaatagaatgaaaatgaaatcctaaagtgtttttagaaaaatgacacttgacagccaggaaaagccccggatcattagattgtgggtttaatgcctggactggccgagcagctacccaattagatggctggccggtggaattttggagttctggagaggggtcctgcttccctggaacgaacgtgacatttttctctcccaacagaattcagcttagagaactatcaacacaggacaatgcaagcccatgagctgttccggtattttcgaatgccagagctggttgacttccgacagtacgtgcgtactcttccgaccaacacgcttatgggcttcggagcttttgcagcactcaccaccttctggtacgccacgagacccaaacccctgaagccgccatgcgacctctccatgcagtcagtggaagtggcggtgagtggagggcccagcctgcctcgtgcgttttctccgcatttccccagatgagctgagccctgttgaatgtgatagccatcaagatcaaatatttgtttataactgcactttgtaaatggaaatgtgccaaattactgatggtggtaaatagaggtacagggcaaaatataggcacagggacagatgagagggtgtcggttgggtgtctacctctcgtcacatggaagatcattctagaaatgacattgagtttctacgctgtggtaggcactgtggtcagcctggaggattccataaggaaaaatatagcacagaacccctgttctcacagggattagattctggcaggaatgagagttttcaaacaaatgttaccaaaagaatgcactcgtggtacatctgacgcttagaacatatccctagcctgttggaagggactttgggatttcaaatagaatagggctggagtaagaacttgacggaagaacacggctgcagaattcggggcaggacatgaagaaacaaccctcaagaggcgcgtctggctgggctgctgagcgccgtggttgtgtgtgacttgggcaaactggaggctgtgctctcatgttaggaaaatgaaactggaatgcgggcaattagggcttaataggagggatggcgtaaggaaaccttaggatcctttcaggaagattcttagtgctcctgctctccctgccttccctagtgagaaaggcagggtgtggagaagatgaagaggccgcatgctcactggtgcttccactcctcacctgttctttggttttctctgtggtcgcttgctttcccctacccaagtcagtcacccttcagtgtttcccgcattcagcagatatgcagaagaacattgtgaaacacaagatccccccatttactgcttccagatgtaagagatggaaggcctcccccacccccccgggctgactgccgcagagggagtgtgtgcccttccacataaagccctggctggagtcagcatttttgttatttatgggattctaggtctttgttttattttagacaagttcttggattcattaatgtgaaactcttaaaatatataaaagattcttcagtctaattcatgccaaaatataaatatagaatgactgaactacagctgagaaaagttaactttctacttgatttctatttagaaggtcagggtaccttaatatttcacctcagctaatcacataggctggggaatgagtggaatctcccttttcctaagggattcctgtgaggttctggcattccttctctactggcagagcacctgatgtgtcacggcagcgctgccatctccatgaagagttgttggcaagtgcagtgttaagacatgtataacttagcagtaactgtaagaaatgagtaattcctattatatgagaaattgtgggggcacttacgtgtggttttaaagctttagcttagcataaaggcattgtgccttgttaaaataattacatatgttctctctagaacagtttaaaacttgagatatgcagcaagaaatgaaaatctataattttactgcccagtatagaggcttcctgatttttctctgtttatagacattgatttagctctgattttcagaatttgtggggcttagaaatagatactgagcttgctttgcctttttaaaaaagaagttaaaagtttaaatttaaaagtagctctggaattctggtgcttaataattacagatgctttgatatagctagcatcatcctgtggacacctagggcagggaaagaggaacttgattcacttcataaggtaccggtgaagagcctgtgcatctggcactgctgcggggggctggtggccggagtggaatattgttgctgtgttcctactttgaaaacaagtaagcagggtttgccagttcccaccctcattctgcacccccatctcacatgcacagtttttatcaccctccttgtccaataaagtttacacggatactaaaatgagaagaatccgcactttttggtttggccacttctcatcacaacccacgctggctgtttcccagctactgatttttaaggcagtagcacagaggttctttgtaaattataccttctgaaatttccttttaaaaatcaggattgtagagctgggtgcagtggcacatgctgtaatccctgcactttgggaggccgaggtgagaggattgcttgaggccaggagtttgagaccagcatgggcaacatagcaaggcctcatctctataaatttttttattttaattagttgggtgtggtggctcatggctgtagtcccagctactcgggagactgaagtggacgaatcatttgaacccaggagttggacactgcagtgagctatgactgtgccactgcactccagcctgggcaacagagcgagaccttgtccctaagaaaaataaaaatcagggttgtaaagaggaggttaacactcatgctggtcacctctaatgaagacctaaattagagaacaggacagacaagctgggttaggaacagaatccaaaaagtgtttcttaagtgttggagcccggactgatcagggccctgtctggagaaccacgtccttgtgtctgtagtggcagctcacagtcataactgtgatgccctgcgtgccaaggaagagcttctatcttctgaaggattttgctgctgctgctctgtgactttgagcaatggatagaagcagattttgtgggtttgctttctttttacatcactgtcacagataatgcaagatttctggtgttagccagtgttccggtttagcctggctacatgttttagcctcttctctgagattgaagccccatggccccctagtgaaaacgatcttcactggagtgactggaaaccttttcggattggtcggagcccagacacacgtggttgcagttaagcaaagtacaggagcatgttggagcggaaagggaccagggaaaagagggatggggcagatgtgggactggactccaacttagaccaggcaaccttgggcaagttcaccaggattttctgaccttcagattcctcatatggaaaaccgaagtgacagtacctttcctccttcagtgttgctaagaggactgaagagttatgcaatgtctgcttggcccacaataagtatgcagcaatgttacttttttccctttgtcttttaatcttcatattttatacacaagaaaactgagtccaaagaggtaaaattatatcatacagttagtagaaggtccagaactctgttatgctgccttcattatagtagtagaaagttgtatattataactagggctttggggaagggggcagtaaaccaggatagaaagtttggatctgtccagatcaatatgaagagtcagtggcttgagcctctaaacccaggagcaggcttgtttgtttgtttatttatttagagacagggtctcgctctgttgcccaggctggagtgcagtggtgtggtcatagctcactacagcctcaaactcctgggctcaagctgttctctcacctctaactccagagtagctaagactataggcatgcaccaccatgcctggctaattaaaaaaaatttttttagagatgaggtcttgctgtgttgcccaggctggtctcaaactcctgggctcaaacaatcctcccaccttggcctcccaaagtgctgggattacaggtgtgagccacagcacctggcctagagcaggatcttttgaaaatggatatgcaggcaaatgagtctaaaggtagtgatggaaatggaaggagcaaaagggacaggtaaaataaaaacagagtctaagttctgttgggtataggatcagaaattgtcaagaatcgggtagtgggctgggcacagtggctgacgcctgtaatcctagcactttgggaggccaaggtggatggatcacctgaggttaggagttcaagacctgcctgaccaatatagtgaaaccccgtctctactagaaatacaaaaattagccaggcgtggtggcgtgtgcctgtaatcccagctactcgggaggctgagacgggaattgcttgaacctgggaggcggaggttgcagtgacccgagattgcaccaccgcactccagcgggggcaacagagcgagactccatctcaaaaaaaaaaaaaaaaaaaagaatcaggtaatggagaggactggcatgaagggggcacaggactgtgaaaacctgagtgactctgtccttccctcatcctctatccctgaaccaggtcagacatagatggaatcagagcaggagttggtgttgatgtggtttcaggtccacctatcagagtttgagagatttaggccatgaaccattatgaatatagatgagaacctttgtaattgctgaaggaggtagtagtgcaggcaagtcctgtgtgcaagacctgctgctcccagttagtacggacccctgtgacattcacagaagttcagaatgtctgagatgctctgcaggctaccttatctccgtctgcagctacacctccagtgatcacaatcagtgctacgctggcacagccagcctggccctgctctggattggaggcatcctcaagggctgcttgctgtggaagcagtttcgctggaccgagaggagccactggaattttgggtactgggccttagggtcacccgggaatgggaatggctgctgtgtggccctgtttgccagagggggccattggtgatgagccccatgcaagtggcatctgcccttcacctgctccttctaagccagcgggatggagaccctccagagagaatatgtgagttcctctccttatgagagccgtggtatgggcattgagatgactgacttgtcaaattagttcggaaagatttttgacaactactacaagatcataatgtacttgaacaaaaacctgtgatatgtgttatttgtttgtttttagatattggagaagggaataaattttagcaagtaaaaacttttttatgccttcacgtcttttctaagacttaattttaagaatatcagaacctggattaaggtttacttctggtgactaacccagttagtctatcacagattcactgtttagattgttatcagaccttggttccagcatgggttcatatcttacaatacacagaaccagttccttgggtataactgatctcgtttcctagttggatgactaaattccacaccaaacgatctcttgacctccaggtcacatgctggccggtggcccttttgcatgagagattgaaatttgtacatccatatgttagcatatatatggttagcgacttgctttagcattttaatcctatgcttcataaagcctgccacagaggatgtggcgctttgggtttcattctccacaagtcacagagaatagttatcagatctatattcactcagcaaggacttgagtttttctggcatgatgtgcacagtaccagggcagagaaggctgctgccctcagggagctccaggccagcaggaagtaccgctcggaccccttgtccttggcagagggtgagagccatcttgagactagagcagtcaatgcaagtgacttgttttcatgccatagaactacagctgtgggttcattctcaggtaaggatttggaagaagcaaactaaaggcaacatatccaggctgtgggagccacgctcaatcaacagcatggtttacaactcaaaagtcacactccaccagaggccttctcagtgtcatggcctgcatgaacaaaccacagacctccagctcacatgcacactgcaacaaggactggcatccttcatccatgtttagagggtgtatatggagcatattaccaagtaggatttccccgtgtggctggtggaatccctcatttccacgtaaccatacttcacacatgtacgcatgtaaaggcccacttgcaaactaggagaaataatttttgcaggagaagagagcagctcgttgattcataagtttttatgaagactcacaccagacttgtggaggtaaagcaagtgtgggcctatagggatcatgccagtggaaacgctaagggcggcgagacacccttctggacttgagtggctggggcccgctgtgagcgggagctgttgttgatctgggcaggattacacgtgtctgtgaggcagacatttagagacaagccttagtggaaactgccaggagtgggcaggaagggagctgtccaggaagggcagctggggttgagttggatggtggtgtcactcgccctcactgacaccagcctgatgggtctgaagaaggtctgtcacagtcagttgcaaggcagggcaatagatgaatgattttgaaccaggtgggaggtatcaggtgaacgctgagaggcagggacaagtattaggaacagtagtagcatctggttgtttctgcagtcatttgtaaatatgacctaataaatactgtttctacagtcatttgtaaatgtaaacctaattctcatctctgggaagctttggaacagaaatcagttatccgatgtgtatttaactagaagcctgtgtgagacttcagaagaatctcctgatccaatgctctggttacatccctatccttcatccttatggaaatctgggatgtttttaggcattaacttccatttattaccatatgtgattgcagattccgggtcagtgttccccatggcctgttattccatggtcttgatagcaacataattgtgcaaatggtcaaatgaagatgggagcaaagatttccccttttaattctacccctagcaactttgctgacgttgtgctcagagaattcctgaaaagtattccagcatttgaggacatttgcggcaagcgatcctggcagttggggcagtggggtggtgtattagtcagggttctctagagggacagagctaataggatggatatataggagtttattaaggagcattaactcacaccatcaaaaggacccaaagtaggccatctgcaaactgaggagcaagaaagccagtccgagtcccaacgctgaaggacttggagtctgatgttcgagggcaggaagcatccagcacgggagaaagatgtaggctgggaggctaagccagtctagtcttttcaaattcctctgcctgcttttaattttggccatgctggcagctgattagattgtgcccacccagattaagggtgggtctgcctttcccagcccactgactcaaatgttaatctcctttggcaacaccctcaacagacacatccaggatcaatacttcatatccttcgatctaatcaagttgacactcagtattaaccagcatagctgggatggagagactatgcttagagggggtgtttttatttagaaatgttattctggcagggtgcaaacatcagcattttcatgccttgaggtaacttcagcaccttttctaaaacttaatgagcttcttaataacaagttatgaaaaaccttgctaaattacattttcttacaaatctacattacaggaaacaattgagttgctttctaagagactgtaagacctgtctgctgacttagggacgcttttaggtggctgaattaggtgggaaaagtgttagagctggtaatgagcagtggtggttgggtggggtggcctgcagggtgagaactgaaggcagagtttctgatctttatgccaagaccaggccacaggagtattaagtgcctggcttaggaatttaaagaaagaaagaggttgattgttatatttaaaaaactatttccgggctctctttacccaggaagaaaaagctaaaggtcactacagatacgtagggaatatgataaagcaggtctgaaaacacaatttgattttgtacaaatgatgtcgcttctcacaggcttcattaaacagagaacgtgtttgatgacagaaacgcataaaggacggaaatgcgtgctgtaatatttacttatgtttaaaaatagccagatggaaccaactggtgccaaatgaaaaatgaccagcgtaggctgtgtttcttgacaaaacaccttcagcacccattgtccaaaagctgaccaaaggtagtagatgggaatgtggctccctttgaactaggcagaagtgaagcagatgccttgtatattcaaatggttggcatgtaaatttctacgggcagtcctattttctggaacaatgtgtatttgtaggaatttggacattgtgacttcaaattttcttccctttcattgaggcgggtttgtggtcagctgattttttttctggtgatgagatgttttgcgaagtaccgtgtcagcctcctacccctacccccgtccctcttcagcaaatcctctgggatagtggggagccgggaagttggaaactggagatggactaggaatgaaaagaaaaaaggttctgagggttaggagcaagtgttgaaaaatcagaaaacccagccaggcacaggtgacctggaccccgcctcctcaaggatgaaggatgtctccacacacagacgaaggaggtgtgggcatgtttgggacctgcctgtgaaccgccaagcaaaccttgacgtacctggatgtctcattgagctaggttcgaagctctgctccactatgtggtggacatgggactgagaagggaagcagcccccccaagtctgagcttcctcatctggagaggggctggcctttagcaggctccatacacattcactcacctcccatctttcctgcatgccagtgtcaggatagttctgcccttctgtgctcagctgggaggaaaggatcttgggaagtcagctagttcagtagtgagtacgaatagtgagcgtgaggcctcattgttaccttgtgacatttacagttcactgtattggggggaatctgggaattttaaaaatatctgtccattgtcatttagaaattattgtggagggggagttgcccaggggctggcctttaaaagacctagtgtaatatatcaaagatgtagtctgctagatatgagaattgatggccagagttcctctctgaaaggtcactggatggaaaagtagttttgtgtctttacaaaaagaagcacatgatggagttctgagcaggctaagatgcgtgtaaaatgtaaatgctgagaaggacgcggttggcgctctgtatccgtggattaaaaatattccatggaaataaatggatggtattgtctattgaacattgccagacattttttccttgtcattattccctgaacaatacggtataacagctacttatttacatcatattaggtattgtgagtaatatagagaccatttagagtatacagaaagatgtgcataggttatatgcaaatactatgccattttatatcagggacttgagcatctggatttgggtatcctgaaggggaacagctgtatagaccacatgttaggtattagaaggaacaaaaaggaatcatttttacccccggactgtggttctacatgctcctttgcaccctagagatggatcccgcattagaacccagccacgtctttggcagtctctttagaagttacttggctctgcctctcccccttctactccttgccctcctctctctcactctcccttctcactttcgccctgcgtccacctccctatccctctcctgcataaacagtagcaacacaaggggcatttaactgctatggctggcagatgcccatttggagatggagatgaatgagtctatgagtggtaaagcttgggcttctctacccctaagaaatcctcaacggcatcatttgcttttgcacttaaataggagagtggcacaaaataactggccatcgcgttcctgttagtcaaatattggtgagagttctggcctcggaaacctttgatatgcagatgttcacggttttcctgcccttcctgcccccaagggggacttgaacttgtttcctaattcagcccttgtggggagactgacctcaggaggaacctgagcttgtagagatgttgcggaatatactcatgaccaccgatttcactgtagtgggtttgactcactatcttttttttttttttttttaactgggaacactatgtaaccacattaaagaggtctatagcaggaggaataaaagactcctaaagcctgctgactcactggctcatgactgatttcctacacattcagctggggttgtctgctttgcttgccctgtttcttgagcccaagcgacccacacacactgcctgctgatcagtaggttatgtcagaaggccgtaagggccaaatttaagctatttttcatttaaataggcgtccctagaaatagctacgtggacttacctaatatagtatttaagtccccagcttttgaagtgattctgtcttgtaaaacctacaagcatttcagactccaattgttacagctttgcttcccagcactcagcttgcaaccccttgcttgtgtagatataactaaggttgctaacacccttttttaaatatagcatttctgttcaaaaaatagcaacactgggccaggcgcagtggctcacacctgtcatcccaatactttgggaggcctaggcggaaggatcccttgagcccaggagtttgagaccagcctgggcaacatagtgagaccttgcctctacaaataataaacagattagccaagcaaggtggcacgtgtctgtggtttcagctactcaggaggctaagtgcgaggattgcttgagctcagtcagacggttgagacggcagtgagctctgataatgccactgaactctagcctgggcgacagagcctgcccctgtttcgggaaaaaaaaataattcattattagaatgtgtggtcttttcatagagccacagattttgaagcacagatcctaatgttttgtgcccttccccttcttattcaaccccctttcttgaaattacagttatgtctgacaactgagtgacagtgtgaccttttatcccgtatcatcgagccttcaattagtgtctccttttgacagatgtctcatttactgcttcattttcaagcttttctcattattctaattgctaattagggtaataataaatatcttgccccaggttacatgtcaagatgttgctttattggggatatcattcacttctttaactttgatttagcttgtttgcctccatgtttctcggattccagaagattatacaccaccaaaaacttaaacctaactaaaaaattatttagctaaaagtttgttataaaatggtcctccagagcagtggttctcaaaataaaatttgggacattgaccaaggtggttgacctgtcttgaagggatatggtctctgtatgtccaaagctaaacttcatctcttttctgaagcctacccccagtacccagtcttctatttgattaaaggggacagtttttcttctcagccctccttctttctgcttacaccccattacctgttaaatcctgttcctgagtgctgcagcacgcccagtgccttggtccttcccggctcccaactcccactgccctatccaggtctgtaggagttggtttctccccagtctcttccctccctcctgttccacacactgcttacgcttcttgtagatttctttctaacccattagcccatcctcaccacttccctgctgaaaacttccctgctggaaacctgctgtccctaggaaggtgcttctcaaactttagcatcccctggagggcttcttaaagcacagattgctggatcgcatccccagagtttcggattcagcaggtctggtgtgatttgctttcctaaccagtgccaggtgttccgcagagcacactttgagaagcttggctctagaatgagcctgtgcacctgagatttcaggcttgcttctgtctgttcatcctgactctccctgcactcttctgctcagccagggttccctggagtccctgtggtcacttagagacaagacgtgggctccttcagaacaagcttgtgtcttgttcaccttatccccatctgcccattcacagctaggggaactcctctgcagagtgcagaaagtggtgttgcttttgaagagagagcactgaaaaagaccatgaatgcatttctgttgtgtcaagaggtatagaaggcacctttgtaagcagagcatcgtgaggacctccctgtgggcggccaggccacctgcatgtctaggccatgctgagacaaccacacttcaccatcatacttggtacttttcttatctcttttcacacccactcattcttcctgttttctctcattttgtcctttccccctttctcttcctaccttagccttggtgccttcggtgtgtttggtggcttcatgggttgaaaaggcttctgatattcactacaaagccacaaaattgcttctgaatttcaggctatttgttggagtcaagactgaggtgatggaggacttgtactgtagttagagcatgttatcgggtgcacaagtaatattctacacaatcatattttacaggaaagttcctctttaacaaaaaataaccctggaagtggactcatgatgtctccattttacagaaaagaaaacagactcagcgattaagtaacaataatgcgtgacactaagcaaagatattctcccattcttatgcacacagagaataacgtttttgcttcataaagtagtgtgctgtagttagtaagcatgtttggaatcacagccataggtgttagaaagtttctgccgagagagaagacattgtgatgattaaaagatatggttaggtcatatttactccagaaaactattagcagtttgggatcaagagtgaaatacacacatgtagcacacagtagatattgacagaatgtctataaatgtataagcataaaaaaaagactgggaggaatttaccaaactactaatagtcatcatttttccttgatatacttctgtatcacttaaatgtttttaaacagtatatacattataacttaagggtggacaaaaagcaaaagagcttgtaggaagagaaatggataatcctaataaaaatagaagagtccatggaaacagatcaggcagtcatccccttctaaagggtctccctgtgagttcatcccctggcacccatccacttcctcctcagcgcggccctcctcagcctgccgccctactctgagacctagcttttccacacttctttttggtgtctcctgttttgtttcatcacaccttaagccagaaacgatctcttccacttttggacagctctctcctcttggtaccagaggttatcatatcacagtctaatttctccaagggtttccagactgttgtaaaagtgaaggcccctctctgaaattaaaaaaaaaaaaaaaggtaggctctaacgtcatagtcactgagcttttatttatcagtctctaaagactgctttttggctttctgtggatgtctggatgccttacagtgtcctttggccccagaggactcagcagctcacattggagacctgctacctgtaaagactactgctgctactgtgggaggctaggccctgccgccttatccatcattaggagttcttgcacatagcaaatatactcaggaagctaacagatgaagacgacttagagaaaggtgcacagcgatgtcaaatctgcacacctataaatgttgcacctaaaactaataaagacctgtgtctgcacatgcatatgttttgtagctgatgattttaactgttagagatgctatgcaagaaagtgaagtttctaacagatgatattgcgcttggtgaggagataaaatagtggaaatagtctcaaaaagaatataggtaacattttagaagtataaccaaatggggtttcatttccaccagagctgaacaggatcagtcctctgtgctgtggatggcagtggcttgagaactgtcaatgtgtgtagtggtggcagtttgtggctcttctcttgctctctttggccttatccggcaggaccagcacttgtaggtctgtaaacctgttttctctcttcaggcatctttctgacttagccgtggttccccgaagcctgtgtttacctccaggcgaatgattggtttacatcagcacatcttgcactgcagtctttcagcactcactcactgggcagctgttccgcaggtggccgcctagaggggtgcggataccacaggggcatattagactttatatttaatttttaagcattttattttttaatggacaaatacaaattatgtgtatttatggtgtataataggaacgagttcaggacatctatttttaataaaaatggtgaccatgttcactattagttggtgactgtagttaataacaatgtaccatatacctgaaattactaagagaatagattttaagtgttctcactacagataagtgacaagaatgtaaaggaatggatatgttaattagcttgatttagccattccacagtgcatagatgtttcactgccttctaacctgcccccctttcttttttgatagggtagtggtggtgcacgaagatccgcactacttgacagcgacgagcccttggtgtatttctatgatgatgtcacaacattatacgaaggtttccagaggggaatacaggtgtcaagtaagcattttcctgcatttgcgtggctcccgctcgccgtgtttcatgaagaacgagtggcctttcagaaatgcacatttgctcctatctttcgcctccttaggatcgctcaggcccctctgtgtccactgtaactttcccagagtcggtcccaaagctcactggaccctctagatgttccctgtggccctgggggctccatggtcaaatatgtgagtgtcacatcctgtattttatggtgagtcacatgttacaccagtgcacaataggctctgacgtttcctgcaataaagaggtctgttgaactgggcccaatccggcatttttcatgcttacttgaccatgagacccatattttgagaaagaaatactgacatcccaggatggcagtgttctgttaaagatacttgggaaatgttggctcatgggattacccttaattattaactgtagtgtaagaaaccctgtgatatccagcatacctcctttccagcctctgtccctcccaggcctcctgtatagggccctcaggtcatactgaacttcctgcagagccacgactacctctgctctctcccagccctgaggctttgtgcagttctattttgctttttagaaatggggtcttgctatgttgcccaggctggactcaaacttctgacctcaagtgagtctcctgcctcagcctcccaaagcactgggactacaggtgtgagccaccatgcccagacttgtgcacttttttttttctttggacggagttttgctcttgttgcccaggctggagtgcaatggcatgatcttggctcaccgcagcctacacctcctgggttcaagtgattctcctgcctcagcctcctgagtagctgggattacaggcatgcaccaccacgcccagctaattttgtattttttaatagagatggggtttctccatgttggtcaggctggtctcaaactcctaatctcaggtgatccacccacctcggcctcccaaagtgctggaattacaggcgcgagtcaccatgcccggccatgcacttttttttcttgatcataaagcctctttctacccccagcctgggtgcttgatgtattctttaatcttacaaaactcactgcatttcaccttttctctaaaaccttcctagtctatcattttcatcccctacctctgagtgaagcatttcttcccttttccctcccagcatgttatattccttctgcataactcctgatggcacagaggtgttcacctggcattctgcccccctagcccgagctccttgagaacagggtggttatcagtcatctcttttcacagcactgacagtgcctggcacacagtgagcgccccactaatgcatcctcagtgaaggagggagtacctctggtttctccacccctctttctattttagccacttcatttttgcttataccaggtacttgtctaaaaatggtcttggaatctgtgctttgttatttaaatcctctgatgcttagcttttatttgggccactgctagctacattgtaatctttttacggtcaggaaccatgtggtattgctggctctatccctcatgataggttgcatgtaatatgcactcaagaagtgcctattggccgggcatggtggctcacacctgtaatcccagcactttgggaggccaaggcgggcaggtcacgaggtcaggagttcgagaccagcctgaccaacatggtgaaactccgtctctactaaaaatacaaaagttagctgggcatggtggtgcatgtctgtaacccccgctactcaggaggctgaggcaggagaatcgcttgaaccggagaggtggaggttgcagtgagccaggattgcaccattgtactccagcctgggtgacacagcgagactccgtctcaaaaaaaaaaaaaaaaaaagaaagtgcctattgttttttacttgacactggtaacattggatgtctcagcttggcgagtttgtcccagtgttcccatagcacgtgcattaagccctattacaaaggaaaagcaagcttacttgtgtattatttaatttatgaacattctcaaagttggtgtcaaggtcagggtttgtctgtgatagtaaatatccatcaggtggatcagcctaacatatggcacatgaaacagtgtgtgtgtgtgtgtgtgtgtgtgtgtgtgtgtgtgtgtgctttgccaccaccacagagcacatatacggtaagtcctcagttaatgtctttgatgggttcttggaaactgtaacttgaaaaccactataatgaaaccagtttttcccataggctaattgatacgaacaggagttacattcccacagcgtatttctagtcacaaaaacatcaccaaacttctaaataaagaccacgcttcttatgttaaacatgaaataaatgtgagcgatacagacatttaggaacaattgataaaaataagatatttacctgtttattccagttaagggtcgtgggcggctggagcccatctgggcagctcaggatgtcaggtgggaactgccctggccaggacaccctcccatcgtagggagactcatactcacacccactcacactcacacactcactccgctcacccacactcactaggaccgtagagatgcaccagttcacctcacaggcacagctttgggatgtgggaggaacccagagttcccaggaaaaaccacatagatgtgaggagaacgtgcaaatgaaatgccgttatttgaggacctgctgtatacatgtaaatgtatatacattcatcgaggagcatggtgacttactttatgcttttgactctcctctgatctgaagacaagtcacataacttttctttggtcgcttgctccccctggaaaatgaaagtccttttatggatgtgtcagagaaggtgaaggaaagtatgtccagtcttcttgatctgtactcattgaagggagctgctttgcaggtctcgatttgcttccttcccccccccccccccgcccccgcccaggaggatctttttattctaagctttgattttcttaggctactgtagaattaaactgaaacaaaagagcaagacccagcacttggataaggggtcagaagtttgttgaatgatagaagcagcccgcctagagtttttaaacctagtactttaaaactgcaccaaggaagccatttataaagattgagctccctgcttctcagtggctctcatctctagctgcacttttgtgccatcggggagcttctaaaaaatactgaggcccaggccccatccctattcaactgaataaaaaattctagagcctgggtatagtagaacctggtatagtatcaagttcccctggtgagcctgcagcttaacggctagttctggagctggagctggcatatgttttctgtaaaaagcctggtagtaaatatttttggctttggtgccatatggtcttggttgcaactactcaactgcagcctcacacagaacaaaaatgaatgagtgtggctgtgtgccactatcactgtgtctacaaaaacagccagtgggcctgatttggcccttggctgcagtgcgcccgtctctgtttttgaggaataaaatcgcatcatttcatatggctaatgcaatttttttcccatctggaagcaacatctgattggactcatcttgtatggtgcttgttacagtctctgtaaatgggagagggtccgagaatagctcttcctgttttcatcaggactgtttttagggatggcaaagaagtcagtgtgtccagcctgtgtcctcctcagccacgtggctgattcctgaatctgcatgtgcagcacactgccgttgtctggggcatgatctgtgtgatggggccagccctgccttccatcctacttccttaggtcctcatgtcaaatcagagcctcctcacgaacactcagacctaatatgctaaagccagatgcactatggtccccttttgcttctttgaaacctgaataggaatcgggaaacatctcggtatttcctaacttttgcttcccagataccgcttcacgtcacctcattttgcatcttttctttgtttttgtttttctgcaatcatgacttcacccatgtaactaggattccaggtaattcttgatacctttggtcatcaaaatttggacacataaagaattatattttcctttccgtattctgaattagaatgctttagacttcttgaaaagttttgatgaatacctcttctgaaaaggtatctgtttaccactacagcaggttctctttaccactcatctgctgactcctggtctaaaccagtagggtgttaaagaggaatcacaaattaagtgcccttaagagttggatattgccttttctcccctctgtccccctctcctgccccacttaaacaaaacagaaataaacaagcaaagaaaaaatcagaccaaaactgagggagaaaacatttccaatctgaagccaccatttcttatctgaggactaaagtagagtctagctgatgtttagtattagagtgcggttgggatacaaattaaaatctaggaatatttatgtacgttcagcccatctgttgttttttctctttttttagataatggcccttgtttaggctctcggaaaccagaccaaccctatgaatggctttcatataaacaggtgagtttgtatgagacaggctctgtggactcctcttgcaagcaggggtgcttctgtatgtgcattcttggagccggaaggtttctccagagtgtatgtgctggaccagctcagagccttgccgtaagcatggggcatccaaggagaaacttgacacaaaggtttggggagaacaagttaaggaatttaacaggtggttcaaagcattgtatttcaaagctgatgtggatacattgtgaagtcaagtataatttttaagataaaattctagaaactctcccggtccccctggcggcatagcattatttctctccacttgaggggtactagaaaaactcagaagctggaacgtgggaatacatcttcatttcacagatgaggaggacctgtctcaggaaaagaggtgactcacccaaggttatagctggttagtggcagaaccaggaccagaagcaaggcctgcagcctcttgtgtaggctttcctagtgcatgctgctgaccctcaaagctgtccttggccaactcaccacctgtgtgacacttacccccaggcagctgtagggaggaacacagatgttcggggaaggcacttgtgttactgtataagcacaaaggaagctgggatctgagtatggtggcccttgtcggtctctagtccccacccatcaacggctacagctgttgaaacagcggctcatgagtggcagtagcagtgcaggaagacgttgctgtttatttttatttttatcatgattacaatgaatgtgggtgccacagctcttccccagtccacacggcaccccggaacaggcacgtgctccagacaggccagctctgctgcctgctgcttccacacagctgtccaggaaaggctcccgtccctggccccccttctcctgctctcggggcaggtaatcatgcggattcatgaatacaaatgcacttcctccttctgggttttgtgtgaagggcagcttaggagctggtgtatttggggtgcgtctgtggaagggatcgttctctgcagcctcggagccacactcctgcagtagtgcttgttggttcttctcagactgaagtgcatgatttctccccgtccgtcctctggggtcgacaggatgcagaaggctttgcttgagaggtgttcatctgtctctcaagagaaggggaagcaacttctcacacctcccctgtagaaggagctaggggcagtatctcacatgattggaaggatttcccatttttattctgtcctgtcagagccaaatagtagtttcttgcacaaatagtagtttccaggatccctcattttcacaagtgtaagaacagcctgtgtgtgttgaacatgtgtgtgttgtgtgtgatggtcctgaggcatcatggaatcctctgtgcctcctgggttacttctgttgtttagtggctggaagagagaagacacgtccattgcagataggcgttttcaaggcagattgaaaatcactggggtttctgaaggtgtgaatctatgacttgcacacttcatttggaagcaggtgaagatacaaaactgaagccaactttggatttgtacattcaaatctttttttttttttcagtcatccaatgaatatgaccttttggtggctaggaatgccttaaagggttgtttttttttttttaagaatgtatgaccgatctagaaatataaatgtgcgtgtattattcaatcatatttaccagctgtatagcatccaattgcaggcttttctcaggctctgattccttaaatgcaaccaagacttttgaactcgtctgtgaaggagagagtagtaatgagcctgtttgtgtcatcctattgtcaccttaccacgatcagtctgttccccataggcagggccaggatggtgccaaggcccagaaccagtagggttccaggccaggagtaggtatggtcttatttcctatgggtatgggtgtgctttaagagtactcttgagaatttgcgaactgagaataaagaaaataactccaggccaggcacggtatggctcacgcctataatcccagcactttgggaggccgacgggggcagatcacctgaggtcaggagttcaagaccagcctggccaacatggcaaaaccctgtctttactgaaaaatacaaaaatcagctgagtgtggtggcaggtgcctgtaatcccagctattctggaggctgaggcagggagaatttcttgaacccgtgaggaggaagttgcagtgagccaagaccatgcccttgtactccagcttgggcaacagagtgagactatgtctcaaaaagaaaaaaaaagaaagaaacaaagaaaagaaaaaggaaaagaaaataactgcaaagtttaagattttttaaaaattttagtttatttggggtaggaacagggagaggataggataaccctgctgaattttgcaaacctatcaatttttacttagttattataatatgcatttttatatttacatgtgttgcttatcattgtaatattgtcctaagtttgatagttttcataattataatatttactatgtagcattttcttagtgatttaccatcatttacttaatcatccagccatgattaggttttttaccctagagatttttgatgcaataattttgaaatatttgcatattgtttatatgtaggcttttttttttttttttttttttttgagatggagtctcgcctgtcacccaggctggagtgcggtggggtgatctcagtgcactgcagactccgcctcctgggttcaagcaattctgcctcagcctcctgagtagctgggattacagtttcacgccaccatgcctggctaattttttattttcagtagagacggggttttaccatgttggccaggctggcctcgaactccctcaagtgatctgcctgcctcggcctcccaaagtgctgggattataggcgtgaaccaccgtgcctggcctgtatgtaggcttttaaaaacctcctcctgagtttgaattgtttcctaagaatacgttctcaagaatggaactgtagaacttaaggataagagcttgctcttattttttataggtctctcaaaagttgctgtttctgtgtttataccaaataaacaagttttggctgctttataaataaaacaaatccatctctctatcatttttaaaattgtataaaactaaaatagaaaaaaatgtataaatagccctgccatataattgtctgtgacctgcagccattgggataagattaattttctttgcagaaggaaccctgcggtcagttctcttaattctgatttcttgtgaataaaaccttgtgttttaccaaaaaatctatcaataaaggaatacctgcatgttccctctccgtttctgtgtgcagcattgcttgctggctgagatacaagcctgccgtctggtcagctttgtttctggagttggggcccaatgctgcttctgactttttcctctccattttaggttgcagaattgtcggagtgcataggctcagcactgatccagaagggcttcaagactgccccagatcagttcattggcatctttgctcaaaatagacctgaggtatgaaccagtaggtacttgctatgcatgattttgagaattctcagatataagagcctaacttctgctagagaccagattttgtagtctgatttctactaaaagtatagctttacgttacaccttagaaagttacacatatgaaaacctcaaccagggccgctgggcacagtggctcacgcctgtaatcccagcactttgtgaggccaaggcgggtgggtcaccagaggtcgggagttccagaccagcctgaccaacatggagaaaccccatctctactaaaaatacaaaattagccaggcctggtggcacacatctgtaatcccagctactcgggaggctgaggcaggagaatcgcttgaatccgggaggcagaggttgcggtgagccaagattgtgccattgcactccagcctgggcaacaagagcgaaactccgtctcaaaaaaaaaaaaaaagaaaggaaaacctgaaccagggccttttaatcgcctttaagagaaaaaagaaatcacttttttggggggattattttagtttttttaaaccaggttcccaaataaaatccttagaacagataactaacaaaggagtctttttactttaagagtcacctctgtggttagaaaaatggcattaataagttatagagagactcagatacatttttgtcaatagcaggttcctttttttcctttctgaaaggtatgaggctttccctctggttggtttctagagtttaaaataccatgggtgatggggacagtactcactgctagccagccttcctttgggcagtctgtcattggtggtctaagcccagcacggtttctgtaaaccagtgtgtaaaagtgtgttagtccattttcatgctgctgataaagacatacctgagactgggaacaaaaagaggtttaattggacttgcagtttcacatggctgggggggcctcagaatcatggcaggaggtgaaaggcacttcttacatggtggcggcaagagaaaatgcggaagaagcaaaagcagaaacccctgataaacccatcagatctcatgaaacttactatcacaaaaatagcatgggaaagaccagcccccatgattcaattacctcccccagggtccctcccacaacacgtgggaattctgggagatacaattcaagttgagatttgggtggggacacagccaaaacatatcagaaactgagtttaaatgagcagctcttttggaagtattgcttatggtatgactcaatagattagtagatctagctggcttagaaaaatggaagcatctggcttgaagaaatcgaatttattcttatacctgcttgtgtccagaagacatgctgactcaatccctgtgctactgacttttttttttttatataaataaagatggcttcttagagttttgtggtctttcaaggggaaaacagcattctccacagctggactgtgactgggcttgtagaatttagtttttttcatcccaaatgaacacatcaaaatgtttgttttgatggaattttatcatgaatctagaactgcaaaacaaataagaaataggttccttcctgtatttatgagttcattcaacaaatgtttgctgagcacccactatatgtcagacactgtgttggggtgccaaagcacagtgactcggcctctcttcctgaggtaccacgtaaggcaagacagacctaaacaccggtgctttctctgtcaagtggtaagtgtgggcgcagggcagaaggattatgggagctcagtcaaggagggctccctggaggtggcacctgagtagaatcttgaaggaaataggggcggggaggccaagggaatgcccacgttcacacctgtgtctgggagtggagcattttcatgtggtggagtggcaggaaagacagccttcctcatgcgtcacatgtgcctaaggagctgggacctgatttctatgttgttggctgaaaattccttctgggaaaaaaccgaaactcagaagcctagttccaggccaagtggatgtgagtgggttgtgcccccttcccccggctgtgcctttttctgtcctgtgtgtcagagttctgcagatgatttcattagaaaggtgcagccggaggcagtggggtacccctgggtatggtagtgaaagagtgatctttcacctttgtccagtaggtagggcagtggctatgtggccagtgccttcagacacatcttactgcatcttgcatgtggcagtgtggccagttattgtctcacttctttcctgcacttttctagagggattttatcaaaacagttttgctgctagacaaggtacttcttcccctattccagggcatacagtgccctgctgccagaggggtcttccttgagccccacagccgctgttttgctgagaaactctcagtggctgctccgtgctctccagccagaaccatctgtgccagtcagatcgctctcactacccctgcttttgatcctgccatcccctctgttagcatctccctgcctccctctgtctctgtctctctctctctctttctttctctttccaaaggcaatctcagttacaccctcccagtagcatctgtagctaccttggccgatggtgggctttcttatctctgggtcagtccctgtctgataattattgctaattatcttttaacatatttgcctcaattcttcaggcggattttaatttatctttctttctctctttctctcctttcctttccttccttttttcttttctttctcaatctctcctctttctctctctgtcctctcatctttctttctctctctctctttccttccttccctccctccctccctctctttgtacatgcatacatacatacatacaggatctcactctgtcacccaggctggagtgcactggtgtgatcacagctcactgcagcctcaacctcctgggttcaagcaatcctcccgcctcagcctctcaagtagctgcgacatggtgtgtgccaccatgtccagataacttttgtagaggcagggttttgccatgtttcccaggctggtcttgaactcctgggctcaactgattcccccaaccttggcctcccaaagtgctgggatcactggtgtgagtcagtgtgcctggccttaatttctttttaagaagggggcatgtgttttgttctcattctgaatcccttatagcacctggcacagagtagtagctaacacagatgttaattttgctgcgtcaaatgttttcactttgaatctctcttgagtattgttctccttattgattacatgatgacatcctgttttctctccctgacctttactgtttgtttagtgggtgattattgaacaaggatgctttgcttattcgatggtgatcgttccactttatgatacccttggaaatgaagccatcacgtacatagtcaacaaaggtacgtctgtgatctttgcctggattattggcatagttattggttaggttcagtgactttacatttgcttacatttgatttgacaaagattttacatgtaaatatatatctacctttttattcaaagaatgtagtacttcaagtatccttgtgctggatatgacagagtgaatcttttaacatcccagagcttattcttcattgtatctcttcatttacagctgaactctctctggtttttgttgacaagccagagaaggccaaactcttattagagggtgtagaaaataagttaataccaggccttaaaatcatagttgtcatggatgcctacggcagtgaactggtggaacgaggccagaggtgtggggtggaagtcaccagcatgaaggcgatggaggtgagtgccctgcctccttcccttctctgaaggctttccctggggccgtgttggctcacacgtgctatccagtgctatctagtgctatggtgcagtcccagcgctggccggttgcctccgcaacccatgaaagagagcagaaacttctgtctcattgctggaaaaaggattctacatgtgtgcccagtgttaacacctcacaccttacccaagtgctttcagcactccaatatttattccagagcactgacaagctgtgcccggaaatgccagaaatgggaattacagcttcaggcaggtggaactttcagtttctgtgtctcctttgggctttaatgccttttacttactaatttgtctctaatgccaagccaagtatagaaatcagcctcatcgttcttttccctggatggctcgtggagagtcttggtgaatttccaacatgcatgtttgatttggtttgttttcatattgactcttaagagtcataccaatcacaagtttaaaggcagccattccaggagaatgagcgtggtggtccatgctcagcttgggtgcttgatgtcagatgatataagaagttgatccccgtcagttggacttggattagagttccatccaaggaacatggccggaggaagatcttttcatatacatatcataacaagtcataggaaaacagagtcagtccttctctttctgaaggtgttagaaatatttttctgaaactgttatagataggattttaaatttttatgtgtagttttcctcctcctacaaagaatttgaggctataagtaaggatctgtagaacctttcctgaggaacccagtaggcacagggaagcgcgggtgttctaacagaaccttctctcttgtgcatgtgtgcgcccctgcccaactctctctctcagtagcatcgaacgtgattccgcaagtgctgacccgggtgcttccttgttgaattggggttttatagcttcttacctagtgtttccccacttctgtttttttacttttaaccctcttttactataatgtaatctctttttcccttaccttcccacagatgcaagaatttttctggtgttttttgactgctgtatgataaagaagtaatgttgaaatttaaaaattatttagttgattgaagattataatataaagtttatattaaaatattaatttatagaagacattgttttacacttacctgtttaatatgatctgtacttagtttttaaaaatattctgagcaaaaggtgaagagatcgccccactgcactgcagcctgggtgacagagcgagactccatctcaaaaaataataataattgcagtatttttcctaagtgatactgtaagagagatgtaaggctgtgaaacttttgcggcaacagtgcactaatttggataatgtttgttcccaataaattaagagccaaattgtatgtaactggtgctttattttatttaacatcagtttttgaagaattgggcatctccagaagttatgtaagaatttttaatagacaaatagaaatctggagctaataaaggttattttgaaaaaaatgtacagaattattgctttagcttttggctgacctctaattggatatattagttcctgttcttaatcggtggtctgtcactacatcatttaaaatgtaattaagattgaaaacttaatgtatgctgggcagaaactcactaagccctgagcacacccatctaatttccacgtgaattgaacatgttcaatggcgtgttcaatggcatgttcattccatatcctcattcaagctgttccatttgaataggaaaagaatataaatagttcatttgttaaaattaatagatattaaagtggccaccaagactgccctaatgcagtaaaccgaaccccatcagtggtagtgactggaagcctgccgctgggaaatgctgtccccgcgcaatgcttctgtcattcttaaccttcaagtccattcaggaaggagtcttagagggtctgctgtggcctgttttataattgggggctcccaaatcctatctccactctacgaggggagatatttgagcagatatttgagcctctccaaaatgcctagcatttcaatcgagcagagattgatttttcttcttcccagattgcagatgtcagttgtgcagaatgtgggggtgaggtagtgctgtgctctgatttgaggaacctacgaagtatctgcagtatctcgttatggttaagaacagggctttattaaaggccctaataagaagtggaagtggggaccagaaatgcatggtaaagactttggctgctgtttttttaatacatcctatttcaaagaccagtcctaataccgtttatgtagttttatgtaagagaagaggtaactggaaaatggcttctcagaacaatgaataaatattttggttctggttaattaaaactgccatagtttctttaattagaaaattatgctgttttcgagccaggtgtgaatgaaccccacagtaaagccagctttaagtgactcgatgtgaccttatcctttacagttagaaaacgtttccatttaagactttttttctcttctaattaaggacctgggaagagccaacagacggaagcccaaggtaagcacaccgtgtcagaccctgctctgtcctctttgtagttttcaatatctagcctggtaccttgtggcttatagttctcttttctgttctgatttataccagctttttttttttttaatctttagcctccagcacctgaagatcttgcagtaatttgtttcacaagtggaactacaggtgagttttgagatagaattgcttctacatatggcagccattggtctggactctcccctacctcttttggatgacttatcagctaacagtagacggaccaaaagcagaagagaaggaagcggttcaagtgctgtcttcttgttgctctgtaagatcttctcagagtccaagagtgccggataattcctcaaacatttattgagggtgatattagattcacctgtcttcctaggacagactatatcggtggctcccaggaagaaaatttctggtttttcttctcttatgactacgtatataccctttaaaatgtgcccatattaataaaggtttttaaagataagtcagtgtaaggattgcaggttgcttaggaatttagtgttcaacatttggttttcacgatatatctaacagtagaggtgtctgaagccctaattatgtgaggtttctgggcctccttcatttctgtcattctttaactttgttctgcttcatatgtgctccacaggcaaccccaaaggagcaatggtcactcaccgaaacatagtgagcgattgttcagcttttgtgaaagcaacagaggtaactttttgggatgtcgtcatctttcctcattgattgacattagtccttgagaatgaaagtgctgaaggtgggcaccagtgtgttaggtccatgtggcatttagaaacgatgtgacatatgggtaaggtcagaactttaggcccaagtccaccttctctcttttttcactttgaacctaatcgccaacccttgccttatgataattaaggtgaattgacagatgaagttcactgcaacatttatatagagaaactctatttggatattgccctagaaacatgtccaagaaaggacagagaagagatggactctcttgtgtttttatccagcgtccctgtatttgggaaataatttattttaaattggcaatgatatgttaaaagtttttgaatgattattatctgttgtggtcagtgtgacttccattgcactagaagtagtaaagccttgcacttcagctaatttcccatgcttttaaagtttactatccagtgtcttagtctatccagtcacagcagggccccatctacattgggagttaggatgttgacatacgaatttagaagggggtgatgtgattcagtccataacaccaacagcctattccaaacttgccttttaaaaaggtgcttattgaaccatatgccttttccttatactcttttttacatttaacataattggcttttgcagtctctttggaagtattctgtagctctgatttttgtagcaggagcctgagcttaatggctttggggaatggacatgtttggtggctgcagaaaactgatctttgagggatcttgccacttactttacttggctcacactttccaaatgccctttttaaagatgtatactttctaaacagagttcaacatttagtaccttaccaaagtgaaattttaatttcctaattggccttcaaacaaaacttaaaatgcattggtggctcattgaggcaaatgattacagaactttgtttaaagtcagttacaatatcaaatcaattacaatatcagtatcttctcagctttgtaagatgtctaatcatgataatggacaatatttttgttctgagtcagaaagttgaaaagtatagatagaatggagtccgatttctcattatattaatataacaatttcatcctgagaagtactacttgggatgcctgtcagacttgaataaaatccagctgagattatagcatgctcagcccacatccagtgcttctggggctgctgtgtttgctcaggattgatgctttcatccattgtcacattattattaagggtgacccagctttaggaaaggaaggggcatggctcagaacttggtatatcatcccctaggtaacgacaatgccctcatttcttagttggtatgacagcagctgctcttgcacaccccctgttttggccagaattctttatgttaataacatgaatattctatacaaaccctcactgtgcctgccctaagtaaggcccattctgagggaaaccagatgtccaaacttaatctgtctgtggacccatcatgatcagcattttataggagagcaaattcctgggtgccagatctgaggttgcattaaacaaattgtgatatgtaaagtagggctttaaggtattaaaaatattgatcaaactcaaaatactctaaggaccttggaaatccaccttcttttatcttctttcctcctttcccttaacaacataaaatgcaattttatgttgaaatgggtcctgtatttcttaaggtaaaattgaacttgctgggtactaggatactgtagtgatgaaatactaactgattagagcatataatcccttaaccttccaatttgagcaaaattttccttgttttgattaaagccctgaagtggatttactttgtcatggggagtgacttccactttgtttgaataattaaagtattgcttttttttttgattcagagtctcactctgttgcccaggctggagtgcagtggtgcaatctcggcttactgcagcctccgcctccctgattcaagcaattctgctgcctcagcctcctgagtagctggaattacaggcatgtgccaccatgtctggctaatttttgtatttttagtagggatggggttttaccatgttggccaggctggtcttgaactcctgacctcaagtgatctgcctgccttggcctcccaaagtgctgggattacaggcgtgagccaccatgccccttgtttttcattttattctttggtgagaagaaattgcagaccataagcaaaagccgtttctcctcagtgttgaggtactatgtgctcagaaataaaatggaagtttactcggagtcttttttttttaattttattattattatactttaagttttagggtgcatgtgcacaacgtgcaggtgtgttacatatgtgtacatgtgccatgctggtgtgctgcacccataaacttgtcatttagcattaggtatatctcctaatgctatccctcccccctccccctaccccacaaccgtccctggtgtgcgatgttccccttcactgggagtcttaatgcttttctgccttgctggtgtctttgcttacagaatacagtcaatccttgcccagatgatactttgatatctttcttgcctctcgcccatatgtttgagagagttgtagaggtaggcatttaattttgttttccttgcttgtttgtgtatgttctgctaagttgttgtgttttacagaaagcacttcccttgagtgccagtgacacacacatttcatatttaccacttgctcacatttatgaacagttattgaaggtaagtgtggcgtgcggactgtcatccctatagagaattctctgctcagccccgttttagaaatggtgcagattatttgaaagaatataaattctttttctgagtatgaacaggatactggaatttaatcactcattttaaaattaggagttcagacttttgaaggatactaatgtggacatgagtccagaaaaaccaactataaaggtaaagtcattattaattcagttctacaaagcccagcgaggcttccgttctgtgagaagtctctatttttgattgtgcttgttcctaatgcacaagttggcttgcgactaattttttcagcaatattctaagtgcccttggagaaagaggatgatccttgagttgacctttgcctaggctccctgtaatcaactgtgtgactaattttaaaactgaccaagaaccaccttttttccttctttgacaattttggattttatgctgtaggaaaaaacaatgagcaccattcattcatttagtgagtagttactgagctctagctgtgtgccctctgctgtgttggagacagaggtgactatcagccgatgctttggatgacagctgccctgtcggatttgctcatcccaaaggatcgaaggcgattagatcccatctgccatctgttccttctacttcctgcacacctcagagtcttctgggtttataaagcaatctcacatgagttgctgtacctaacgagttttagaggtgtgcctagaaggcaggccacgctgaacaaaagctttctgagctgtaattgttaaacagtgaaccatggtgtacctttctcgtggtttctgcttctaagacagagaacatttgtacttcccttgtgtcatcttttgaatcttttctttttaaattttaaaataggcaaactgtcaggtccatatggcttgccagcatggtttgtactagacaggaaaaaaatcatgcagtgtattctagctgaatggcaagccactctggtattagataccctggtgtcacaaattcatcatacttggtggcctttcagaaacttctagttagattcaaacaaaagaaagtgagactttaacaaacttggactctaggcaagaagttaagtttttattttgagaataaattaaatgtaaagtttctggaaggctatatatatatatatatatatatatttgagacagagtctccctccgtggcccaggctggagagcagtggcacaatctcagcccactgcaatctccgcctcctgggttcaagcgattctccagcctcagcctcctgagtcgctgggactatgggcacccgccaccaagcccggctaatttttgttttagtagagatggggtttcaccgtaacgtggccaggctcgactggaactcctgacctcaagtgatccacctgcctcggcctcccaaagtgctgggattataggtgtaagccaccgcgcccagccactaaaaatatttagaatatgtaataccatgtcattcattgaacagatacttaccaccgcactaaaagagtagaacctctgtggtcatcactaaaaacaacatagcctggttttttactgagtcccatatcttcaggataaccaagagaaataccacatttccatgttgtacaatgactagtaaatgcacattttttttaagttacctatatttaggaaatttaagatttctggaaactggcctgaaatgctaaaactgaaatgttggatgttgtccatatgttgtgtaacccctgctgtggtgataaaatgtttgttttttccattacccctatagtgtgtaatgctgtgtcatggagctaaaatcggatttttccaaggagatatcaggctgctcatggatgacctcaaggtgcttcaacccactgtcttccccgtggttccaagactgctgaaccggatgtttgaccgagtaagttccaagcagcgaagtcccaggactgagcactgacttggacgcaggggcttgggcttgaattgggctgtgccatgtgccatctgtatgaccctggacaatcctcccaatcttacagaacttcagtttactcatctgtaaagttagaatgcgtttacctctcagagtggctgataaggattataagagaaaatgcatgaacacactttgtaaaccatggtcacaacacaagcataatgtgggaggtcattttatttttacaataaacactttgagcctctgcttcctcatgtgtaacacggactgtttacctcttctctcctactgtttgtctccaaaagttgctaatgggatcacgtaagaatagtaactatgaaatggttttcttcattgtaaagctccttgcatggacatgtaaaacattacttaattggccacactgaaagaagtgactaagccacagcagagcccaagagaacaccagcccctctgcggtgggtatcattgcgtggaccgcacagccagggccaggcgcgaggggcatgagcaatctccagaaagagtgttcacttactctttattttgaggcaggacttttgttatctctcagaacgttcttatgtttttaatggttctttttaaaaggacaactttatcaacatataatactctgtataatttgctgatttaaagtgtgtaattcaaaggttttgagtactttcacagttctccagccatcactacaatcaattttagaacattttcatgacctccaagagaaacccttacctattctttatcagctccccgaccccctccacccttcagcatccgctcatctgtgtatttctctattctggacttttctgtggatggaatcatgccatatgtgctcctttgtgactggcgtctttcacaagcatccatgtagcacgtattagcacttcattccttttaacggccaaatagtattccactgtatgggtataacgcattttatttatccattccttttttttttttttttttgagacagggtctctctctctgtcatccaggctagagtgcagtggtgttatcatggctcactgcagcctccacctccagggctcaagcagtcctcccaccttagcctcctgagtagctgggaccgcaggcatgtgccaccatgcccggctaatttctgtattttttgtagagatggggtcttaccatgttggccacactggactcaaactcctgagctcaggagatctgcccacctcagcctcccaaagtgctgggaatacaagcgtgggccaccgcacctggcctacacattcctactcgatgggcatttggggatgtatgtgtccattgctcctgggtgtataccgaggtgtggaattgctgtcctgtgctgaccatgtggggccgttagaggaccggccaggctgtcagagcagctgtgccattttgtgttccccagctgtgtgtgagggttctgatttctccacactctttgactctggccatcctagtaggtgtgaaaactttctcatgtcttgcctcattagattttcggacaagcaaacaccacgctgaagcgatggctcttggactttgcctccaagaggaaagaagcagagcttcgcagcggcatcatcagaaacaacagcctgtgggaccggctgatcttccacaaagtacaggtaacacgtgactcacagccactgctcccatggaaaccgacttcgcttttcagagttctgggagggccttttttgtgagagggagagatgaaggtaagggagagaataacatgtttttgttaattctggcacacatttaaaaactaaggcaaagccattaaggaggcctcagtttctaagatcaatagtattgcagccatctagggggaaaaggagtcagggtagtggagcctttctcattctccattttgttgcgtttttccggaacaagcgtgtcactcttgaggtaatttttcaagcatgagtgataacgtgtaacaatatcatgccccccagaaggccagaattgtggtagttgccacagatctgcccagttgtgttctaattccctgaaatagcttctgcagaggtggggctgacttccatccccattgggagggaacagggcagtcacgggtggaaacaaaccgtagccctgtgctgccatcatgagggctgtgagttctccgtgtggcctccgtgtggtctgcagctatgggttagggaacggggtcccaagcaggcccccttggcggagaggccgccgacttccaggtgtgtaaccctcaccttctcccactctccctccctgaaagtcgagcctgggcggaagagtccggctgatggtgacaggagccgccccggtgtctgccactgtgctgacgttcctcagagcagccctgggctgtcaggtgaggtggatgtcacggcgcctgattctcccacactaggatgcccagtcctcttctgcaccaaaagtcatctgtactgtgtgtgtgtgtgtgtgttctttcttaattgacaagcgtatctatatttatggcgtaacaacatgatgttttgatgtatgtaatatgtaaacattgtggaatggctaaatgaagctaattaacatgtgtcttaccacccatacttttttttcccacgtggtgagaacacttggaatctaccctctgggcagttttcaagtatatgatacattgttgttagctctagtcaccacgtggtgctatggagctcttgaaccagttcctcctgatggagactttgtgtcctttcaccaacatcacccctatccttcccaccccctactttgtgtgtgtgtgttatgtttgtttggaagatatgttattattaggttgcttggagaagcaaccatatgtatattttttaccctaggcaggggaatgtgtgtgtctgccatttgttgaattttctctaggatcaggtgcaagacaacctttagaagcaggtatgcagctgtggaatgggtcacaggtgatgagcctacccgcacaccatgctgacaacctgtagtaaagggagaaaggaggatttggtggcagacggggcatgtgtggggtacatgtcctgtgaattggccaagggagttcactgctgctgggtggtgaccagtcacataggggttctccctcgcttggccactggaagttaaatagaaggtgtacctgggtgacggctggtgttggcgtaaagcacactggaccattgaatgaacttactgaacagaccatttgaaatgagatttcaccagtcagccatgacttgggagttagtgagacttcattgcttgtgcacttccagtaaaggtgtgattgtgctctccttaataatgttgcatctcttggtgccccagttttatgaaggatacggacagacagagtgcactgccgggtgctgcctgaccatgcctggagactggaccgcaggtatggctgtaggaggctcctttttggaattttgttattcatactgggttattggtatgtctggaattgggttaatcactgactggttcattaaccatcttaaacaaaagtgctatgtttctgatcattaggctctgggggcaaacactcttgtaagtcagggcactgtggggagaacacctcctgcaactgaggggtggcgctggggatctgactgtaaagctggtggcagcagagacttgcctagactctactagtgacatctgagaggggccctgtgttccagattgagagtgtctggcccaacagagcttcctagtaattgagtagggtctcgttatttgctggtcattttaaacaacaaatagttattgaatttgtactgtgtgctgtgctaggtgttgggactaccaataggaataaatacaagtcctttttctcaaaaagtcatttctcaaaaggaaaaaggaggaggacaaacaaaaataattgagcatctgtcatgggtaagcctctgtgatgggtgcttaggatgtacctaatgtcagtgtaaccccaacagtgtccctgtgagataagttctggtacttctcagaggaaattatagattgttgcttaagtaacacataaatgatgtatgagaatttacgcggcattatgctttggagccaggatttcaaccccggcctgactgcagagcttctgtgcttcctctgtgtcacctgagtagtaaattctacactgtgataaataaacttcccagcttatttggagtattataagtattagcaccatttagtaacatatattctagaacctagcactgtccactaacatcattgtcctggaattaacgcagacagtctgtgaatcttctttatggtatttgtttaatttttaacctcagtttccttaacagagaatttggaatactgatctctagaagctcaaattattaaaacataggaagaattatttgtgatatctaatgtgatatctaacatatctaatgtctgttgttgctgcttttggaaaagacagcccagtcttaacagcctttggcaagagagttaagttagctgtagaaataagcactgtcccgtcttagtaaaaactgtaagacatgcttcttcatacgcaaggaaataaaggccgtgttgatcagaaccaggtggtgcgtgaggtttgccaaagctgcatatgttctctcttcttacagagaacaggatgctaagaattctgtgtaagatgagtgcaagtaatgggtgggggcgatcggagggtggaagccgagtgaaggtttgagagaggctgcttccaggtgtttgtaggaaccttcacatagaggccaaattactcataaataactcagagcatcacacttggaaaaggtcctgaagacactaaatatgttcttccctagtctaagaatagactctcttaaattatactaggaagagaatggctgtaattgcagaaatcagaagtttatcccagccgtttttcttatgtggaatcctgtttgctatcaaaataatttgacctgaggttatgagtagttcccttaggaatgaccatttgcttatttaatatacaggccatgttggggccccgatgccgtgcaatttgataaaacttgttgatgtggaagaaatgaattacatggctgccgagggcgagggcgaggtgagtgaaaaccgtcagtcattttccctcgctgccatttcctgtgatcgctggcctttgcgaatgctgtggtatttcccaacagctcaataaagccattgaacttgacttcattggtgatcctggagtctgccaggcttctttctgagggtacatttatgttcagctctcggggagtgggcaggagggacactgatgcctgtcttcctctgccaggcctcatagggatttgggctggagagcctgcaaagaaaggcccggtggcctcagttcctgggacgaaggtcctgcctgttgattgccctgggtacctattagtgagctgctggctgctggatgggaagcctaattacttaaaagtgatttcatcccctgcggggctttccaacagctttgagccagaacctagggcaagcatttgccctacaaatcggccagagctgaggtaattcaggaagggaagtaggggcactggagatctctcgcagaccctggtggggctctggtaactccctctgcatcctggagtttagggcttccagctaaaggttggggcagacacacacgtacacacatgcacacaccagttttctctggaaaaaccccagtaaatgctgttcactgatgatcttcttttctttaggtgtgtgtgaaagggccaaatgtatttcagggctacttgaaggacccagcgaaaacagcagaagctttggacaaagacggctggttacacacaggggacattggaaaatggttaccagtaagttgccgcctcctcaggtcacaaacagttcagttccactgtggggaagaaaatgtcttatctactgtgcagctgccatgtggcagtggcaccctgaattttctctttcccttcctccttggtgagtggtatgatgtagactgttccatttcctgcaggggacagggttacacttagcatccttggttggattttcactttcacttcagcgaatatgttttgttctgatgcttttttgtttctttgttgtgtttttggggttttttttttttgagacggaatcatgttcttgtcacccaggctggctggagtgcaatggcgtgatctcggctcactgcaacctccacctctcgggttcaagtgattctcctgcctcagcctcccaagtatctaggattacaggtgcccaccaccacacctggctgatttttatatttttagtagagacggggtttcaccatgttggccaggctggtctcaaactcctgacctcaggtgatccacccgcctcagcctcccaaagtgctgggattacaggcgtgagccaccaccgcgcctggcccgttttgatgcttaacatcaattctggttgttgcttctcaaccggaatacaaagagacagtggcttttttacaatatccgtactgagccgtgatgttgaggcctcagttaaataagatctgggggaagttgtggtagacttccagcaatgtaggatgggtaaggatttgggaataaatgtgtttcttaggtttgtcatctcattaaaaatagggtgtttcacagattaggcgaactccttgaatttagttgaatgtagtctcagaaccatttactgtagagaaattctgaagagtctatcttaagagtgagaagcttgtgcaagaagcctgacctgtcctacctgttggtttgaccagtaatctgctgtttcgaagttattatgatgctgattgcaagccctaaaattacaaatataatttttattactgtgtattggcagattcttgtagattttaggtgcttatttctttggaatttgtattgattagaaaaatacctcccaaaattacttcagattttgcaatacccaaactatttagagctaaattaagtccccctcttccggttcaagagagattaaatgtcagttccaattctactgtggcactcacgaacacatcccatagtctctctggaccttggtttgctccttttgaaaatggagaactggtgtggaacaaaagaaccctagacactttctacagatgacttttggaggcatgagagtggccccggggtggggatggggtaaaagtgggactagggttttgcttacggcactactgggatgtggctggtctggtccagagatgctagagcacttccacagttgactcactcttcccaaagggccaagagcacccctccagacatcgaggaagaaaacaggaatttggcctttgtgtaggaaacatttcttgaactcttactctgtgcagagcactttggaaggaaaagttgtgttcctgctattaaggaacttgagtcacttggtgagccagatgtgtatgcgcctaattcagacaggaggctaaatgagccagcaaagccttgctagtgttgaccagtcagtggtgccaagtggtgacgctgaataagcacgggctctaggaccccttctctgtctctgcacttggccaaatagccttggacaagttcctcagtctctctaagcctttgttttcctctctgtaaaatgggatcataactgacctctgtgggatgttattagaattaatcaatagtgtgtattaaatacctttcagtgttgtactgggatccatcctggttggaaaccagccatcagcccattcataaccccctcccctctgatcaacagaatggcaccttgaaaattatcgaccggaaaaagcacatatttaagctggcacaaggagaatacatagcccctgaaaagattgaaaatatctacatgcgaagtgagcctgttgctcaggtgtttgtccacggagaaagcctgcaggtatgtgctttctgggtcttgaatcttgctgcatacacattgccattgcctggtactccaggggctttaaatgtgattggaagtttgagacgcctatcacttggctttcatgtctaatctgctagaatatcattgacctgttactgatttttgttgcttggcatttcctgctcaggaaaatttgttctctttaatttccacatttttattttacttagagaggtctgatgtaccaaggggaggttggataaacatactgggggacaggggcatgggtaatatatgtttccaattatgaaagaaaatattgacatgggttataagaaagtttacaattttcaaacatattaaacccagcctattgatgatatgcttcctaatcatttttgagcaaacggtggttgtgaaccaagaatactcaaagttgaaaatcaaaatcagtattgcagtgaaacatgtatggtatttgccaaaatgttggacagatgatgccaaggaagagaggatctggtttcctgaaaattaaccttttggaaagttgggtcaaatggtatttctagttctagatccctgaggaatcgccacactgacttccacaatggttgaactagtttacagtcccaccaacagtgtaaaagcgttcctatttctccacatcctctccagcacctgttgtttcctgactttttaatgattgccattctaactggtgtgagatggtatctcattgtggttttgatttgcatttctctgatggccagtgatgatgagcattttttcatgtgtcttttggctgcataaatgtcttcttttgagaagtgtctgttcatatcctctacccactttttgatggggttgtttttttcttgtaaatttgtttcagttcattgtagattctggatattagccctttgtcagatgagtaggttgcaaaaattttctcccgttctgtaggttgcctgttcgctctgatggtagtttcttttgctgtgcagaagctgtttagtttaattagatcccatttgtcaattttggcttttgttgccactgcttttgatgttttagacatttgacccagcaatcccattactgggtatatacccaagagatttataaatcatgctgctattaaagacacatgcacacgtatgtttattgcagcactattcacaatagcaaagacttggaaccaacccaaatatacaacaatgatagactggattaagaaaatgtgtcacatatacaccatggaatactatgcagccataaaaaatgatgagttcatgtcctttgcagggacatggatgaagctggaaaccatcattctcagcaaactatcacaaggacaaaaaacaaacactgcatgttgtcactcataggtgggaactgaacaatgagaacacatggacacaggaaggggaacatcacacacgagggcctgttgtggggtggggggagggagggagggatagcattaggagatatacctaatgttaaatgacgagttaacaggtgcagcacaccaacatggcactaacctgcacgttgtgcacatgtaccctaaaacttaaagtataatttaaaaaaaaaagaaaaagttgttagattttaaaattattttaggatattttcttataagagaatgcacttatttttctttgagattgcagctattttcgtttgatctagaatcttctcattcttttgatttttaattttattgttagtagattataaagaatgggatattagagatttttctttaaaaatgaacctatatacattttatttatttattttcttaaagatagggtctcactctgttgtccagctggagtgtaatggcagtcatagctcattacagcttcaaattgctgggttccaggggatcctcctacctcagcctcctgagtagctgggattacaggtgcaagccaccacacccagctgattttcaattttttggtagagatggagtctcactatattgcccagactggtctcgaactcctggcctcaagtgatccccattggcttcccaacgtgctaggattacaagcatgagacaggcttcctttttttccttttttttttaaaagcagttatctgatatccatcaccttgtttacttgaccctgcttttaaaaaaataagtatataaaagtaaatacgaattagagatttgttagattggtattcccagtggttttttaaaaacattaattgcaaaattcctgatgcttaccacattttagagccaggagttcttaatctgggctgagtgaactcctgggggaggggggtagtatgttctgaatagatgagccataactttcatcatattctcccagggggccacaagatggaaaaataaagaaccactattttagagcatttggatcaagctatgtaataactcatttgtctgtgttaaaggcatttctcattgcaattgtggtaccagatgttgagacattatgttcctgggcccaaaagagaggatttgaagggtcgtttgaggaactgtgcagaaataaggtaaggttctgaagggtccagtctgtcctcatcataacttggcattaaatgtacctgtagatattcagggacctctaacagaggaagtaatttatttttcttacccttttaggatgtcaaaaaagctatcctcgaagatatggtgagacttgggaaggattctggtctgaaaccatttgaacaggtatgaccttcatctgagtgggtgaattcctgtaaaacaaattttccattaagatttttttacaggtagattatataaacatatggggtgacctaaagacatacatgaggaataaataatggagtagtttgacaggggaaaggtttttaaatcaaaagcatttattctcttttcctggatatcagaatatgatcccgaatcctatcctaagaataggatgcctgtcctttgttgagaaggtgcagcttggctgaaatgagaggatggattggatggctggagagtgttgatcccctccaaggcttacgtgcttttgagactggtggcccgtgtcctttttcctcttttaactgccttgtttattggcaggtcaaaggcatcacattgcaccctgaattattttctatcgacaatggccttctgactccaacaatgaaggcgaaaaggccagagctgcggaactatttcaggtcgcagatagatgacctctattccactatcaaggtttagtgtgaagaagaaagctcagaggaaatggcacagttccacaatctcttctcctgctgatggccttcatgttgttaattttgaatacagcaagtgtagggaaggaagcgttcgtgtttgacttgtccattcggggttcttctcataggaatgctagaggaaagagaacactgccttacagtcacctcatgttgcagaccatgtttatggtaatacacactttccaaaatgagccttaaaaattgtaaaggggatactataaatgtgctaagttatttgagacttcctcagtttaaaaagtgggttttaaatcttctgtctccctgtttctctaatcaaggggttaggactttgctatctctgagatgtctgctacttgctgcaaattctgcagctgtctgctgctctaaagagtacagtgcactagagggaagtgttccctttaaaaataagaacaactgtcctggctggagaatctcacaagcggaccagagatctttttaaatccctgctactgtcccttctcacaggcattcacagaacccttctgattcgtaagggttacgaaactcatgttcttctccagtcccctgtggtttctgttggagcataaggtttccagtaagcgggagggcagatccaactcagaaccatgcagataaggagcctctggcaaatgggtgctcatcagaacgcgtggattctctttcatggcagaatgctcttggactcggttctccaggcctgattccccgactccatcctttttcaggggttatttaaaaatctgccttagattctatagtgaagacaagcatttcaagaaagagttacctggatcagccatgctcagctgtgacgcctgaataactgtctactttatcttcactgaaccactcactctgtgtaaaggccaacagatttttaatgtggttttcatatcaaaagatcatgttgggattaacttgcctttttccccaaaaaataaactctcaggcaagcatttctttaaagctattaagggagtatatacttgagtacttattgaaatggacagtaataagcaaatgttcttataatgctacctgatttctatgaaatgtgtttgacaagccaaaattctaggatgtagaaatctggaaagttcatttcctgggattcacttctccagggattttttaaagttaatttgggaaattaacagcagttcactttattgtgagtctttgccacatttgactgaattgagctgtcatttgtacatttaaagcagctgttttggggtctgtgagagtacatgtattatatacaagcacaacagggcttgcactaaagaattgtcattgtaataacactacttggtagcctaacttcatatatgtattcttaattgcacaaaaagtcaataatttgtcaccttggggttttgaatgtttgctttaagtgttggctatttctatgttttataaaccaaaacaaaatttccaaaaacaatgaaggaaaccaaaataaatatttctgcatttcaggtga

SEQ ID NO: 22 - DNA, 29441 bp, Homo sapiens
ctgtttctctgcagttttcctcagctttgggtggtggccgctgccgggcatcggcttccagtccgcggagggcgaggcggcgtggacagcggccccggcacccagcgccccgccgcccgcaagccgcgcgcccgtccgccgcgccccgagcccgccgcttcctatctcagcgccctgccgccgccgccgcggcccagcgagcggccctgatgcaggccatcaagtgtgtggtggtgggagacgggtgagtgcgcggccggggccgggctggaggccgcgggatcgggcgcggaggggggttgggcccggactggggcccaggcaggccggcgtccgccgcggtctcgcgtaggcggtgggcctgggcctgtgtcgcggggcgggggccgcgggcgggcgcccccaccggaccctgacggcccgggcggcgcgtgcctggttccggctctcgatggaggagggcctcgccgctcgccggctagagggaaaagtgaactccaccctccggctttcttcccggacgccgcccgccgccctcctcgggagcgctcgtagagcaagcgctcttggagattttgaccatttttccaaaaagggaccctttattttttttgcatgaacctctcgatccccttttgagaattgggttgggaacgcggcggtcaagtcgatcatatttgatgcatgcttgattgtacgggccgctttggtgcccccaaacttttctttaaaaaaatttttttttcatagacggggtctcgctgtgttgcccaggccggtctcgaactcctgggttcaagcaatcctcccatcccagcctccaaaatgctgggattacaggcgtgtgccaccacgcctggctaatctttaaaagttttttgtagaaatggggtctcactgtgttgtccaggctggtctcgaattcctgcgctcaagtgattctcctgcctctcagcctccaaaagcgctggggtgacaccgcgcccggcctctcaacttattttcgacaggttttttgacttacacttctgccactgttaggattcttaaaattgttttcgccctttccgtggagaaagttttgaagatgctggctgggaggagccggctgtaatgggggactgttttttcttttctttctttcttttttttttttaaacaacgtggtgtggtcattgacaaaaaaactgttctttgcttaacgcgttaggtatgggatgtagcagaactggccccctgtgactccaggcattgcttttcatgattgtccgtgatggttacaggccctagaggaagacaaaacttgtcttatgcagtttttttctcccatagaaacaagaatctcagtgtaacccgagcaaaatcgcgcgtctcagcgttgcttgtataggttagtgttagcgaggaagaattactaccagtttaatcaaactcaatgcaactggtacatgttgcagtaaagtccaaggaaagttctggcatcacggttaactggattgatattcttcaaacttatcattaggacagattttggttcttgcaattcagatgcaagaaggataattagacagctgatttttgtaagatgcccatctgtcggatttgtcttggaagtgtgaaggagtattagagtatgtaggctattcaggcttttttttttttttttttttttttgagacggagtttcactctgttgcccaggctggagtgcagtggcacgatttcggctcactacaacctccgcctcccaggttcaagcgatcctcctgcctcagtgtccttagtagctgggattacaggcacgcgccaccgtgtccggctaatttttgtattttttagtagagacggggtttcaccatgttggcctggctggtctcgaattcctgacctcaggtgatccacccgcctgggtctcccagagtgttgggattacaggcgtaagccacggcgcccggcccaattttttttttttttcttttcttttttttttttttgagacggggtctcactctgtcgcccaggctggagtgcaatggcgcgatctctgctcctgcaacctctgcctcccgggttcaagcgattctcgtgccttagtctcccaagtagctgggattacaggcgcaagccaccatgcccagctaatttgttttttttttttttttttgtatttttttggtggagacggagtttcaccatgttggtgaggctggtctcaaactcctgaccctcaagtgatccgcccgcctcggcctgtttttttttttttttttttttaagtcatattgctgataattatttgaaaatttctaaaactaaaacataagcatagcagatacgtttatttaatactaaccgattgtggacctctgctgtttgaattggctgttttatctagtcaaataacttgttgaatgtcatggaatctggaccgtcccttcaaatccccaccccaccgcttacatggggtaaccctaagcacatcccccacctcccaagagaggcggttcaatgggaggtcaacaagactaaacaagatgttggttattaactacctcgcaggtgccccttgctgaatgcttagtaaatgccaggtactgttattgcggtttctactactgagactctgtgagggagtattaggcttaaaagtctgtggccttgagttttcagtctgttttttttttttaattagttatgagcatttgaacaagcacagttattttttaatactatgtttagtattgatgttgactacagctaagtgatattagaagtgaaatgtacctggccaggtcaggtggctcacacctgtaacccagcattttgggaggccaaggtgggtggatcactagagcttaggagttcaagaccagcctgggcaacatggcgagaccctgtctctgctaaaaatacaaaaattagctaggtgtagacacatgtgcctgtagtcccagctactcgggaggctaaggtgggaggatcgcttgaaacccaggaggtggaggttgtagtgagctgagattgtgccattgcactccagcccgtgcgacagagtgagaccttgtctcaaaaaagcaaaaacaaaaactattagagatacgtctttggccgggcacggtagctcaagcctgtaatcccagcactttgggaggccgaggtgggcggttcacctgaggtcaggagtttgagaccagtctggccaatatggcgaaacctcgtctctactaaaaatagaaaaattagctgggcacgcctgtaatcctagctattcaggaggttgaggcaggagaatcgcttgaacttgggaggtggaggttgcagtgagccaagattgtaccattgcactccagcttgggtgacagagggaaactgtctttttttgtttgtttgtttttaaaggagatacatcttcatctgttcctgctttgaccctttgcctggaccatggcagtgtcctttcaggctgtacgtccctccatcctgccctcctgtgcctctgcttacactgggctcttaaggaaactcctgctccttgtctcatcatccctagggatggttctgtcttatcatttctagaattggatgccttgccatcttgtttgctccttaactctgcatacagggctgtgtaaataattccttcatgaaaatctctatttcaatcttctgggatgagttttttccttctgggaccctgactgatagagactgataatacacccgtatgaaaatatgtctgccaggtgcggtggctcatgcctgtaatctcagcactttgggaggccgaggcaggcggatcacctgaggtcaggagctcgagaccagcctggccaacatggcaaaaccctgtctctactaaaagtacaaaaattagccgggcgtggtggtgggcgcctgtaatcccagctactcaggatgctgaggcaggagaatcacttgaacccggaaggcggaagttgcagtgagctgagattgtgtcactgcactccagcctgggcgacaagagcaaggctctgtcttgaaaaaaaaagaaaaaaagtcagaaataatttgcaaagcatgttagaaaattctagatttcctgaatagcaatttaattgagattggccaagaaatattacatagggttgatactcttttattctaagatagtcctttctgagcatggggtctataatttttttttcctccaccttactgctgccccaccttttaactttcacttagtggacctttgccccaagattttctctcagcttttcctaggtaagacagcatcacccgggcgcgatggctcatgcctgtaatcccagaactttgggaggccaaggcaggcggattgcctgaagtcaggagttcgagaccagtctggccaatatggtgaaaccctgtctctactaaaaatacaaaaaaattagccaaggatggtggggggcgcctgtaatcctagctactcgggaggctgaggcaggggaattgtttgaatcaagggaggtggaagttgcagtgagccaatatcgtgccactgcactccagcctgggtaacagagtgagactccgtctcaaaaaggaaaaaaaagacagcatcttacattcaggtatttataaacaacttttattatttatttgtttttattttatattggctcactgcagcctccacctcctgggttcaagtgattctcctgcgtcagcctcccaagtagctggaactacacgtgcctgctaccatgccgaggtaattttttttttttttttttttttgagaaggagttttcgccctttttgcaaaggttggagtgcagtggtgcgatctcggctcactgcaacctcctcctcctgggttcaagcgattctcctgcctcagcttgtcgagtaggtgggattacagtcacgctccaccacactgactaatttcgtatttttaatagagacgaggtttctccttgttagccaggttggtctcaaacgcctgacctcaggttatccacctgccttagcctctcaaaaagtactgggattacaggcatgagccactacgcctggcaattttttgtatttttaatagagacagggtttcaccatgttgaccaggttggtttcgaactcctgaccttaggcgatctgcccgccttggcctcccaaagtgctgggattatgggcgtgagccatcgtccctggcctaaacaacagttttattattttattttttatttttttattgcttattactattttttgagatggagtctcgctctgtcacccaggccggggtgcagtggcatgatatgggctcatggcaacctctgcctcctgggttcaagcagttctcctgctttggcctcccaaagtgatggaattacaggcccgagccactgcgcccggccacaactattttaatagtgttgttttggtgttggttgattaaaggaatgggaacgaatgacttgaagccctctctgtttcactctttatacaaagtggagtccagattgggctagtggcctgtctagcccaatgtctgacttggacatacattactgtccaggagtttcttagctgaatgtgaaaaatgccttccgtgacatcatccttacaggaacattctttacatttattctttacttctgttgaacggtggtggcgtgaaccatgaatttgtttaagcttttcagctgttttgtgtgttttcctctcaaggcatggggtttcatatttttgacctgtggtaaaggtatttgaattctgcactggcctccaaatgtaggtgtagtatatggctctgatctttgttgatgattttatacataatgtggttttttttcttgataagccaaaaaaattatacataatgtgtgtgtgtgtgtgtgttttaatttcaaatgatagttacagtaaaagtttggagttgggctaagtgggaggagcatcaggaagccatttttagaaaccttaaattcaccctttataactttctgtctttttgcattagtcatctgataccttagtactgcctactttttcacatctccatcactacgtagctcttaaaattgtagtcttccttgaaaggagatgtttttgtcaagagtctttgccaccaaggcaggattgcatgtgatcagtaggaatattttcctgcaatgtcttaatatgaaaaatttcaaacagactagtggaaagcattgtacagtcaacatgcacatacccatggcctggattctatgacagtattttgctctacttgttcattttgctgtatttgctttatcatgtcttcctgttatcagagggaaccttttaagaggatttatagaggagttgattttgttttttgttttgttttgttttgctctttttgaggtggagtcttgctctgttgcccaggctggagtgcaatggcatgatctctgctcactgcaatctccgcatcccaggttcaggcgattctcctgcctcagcctcctgagtagctgggcttacaggcacccaccaccatgcctggctaatttttgtattcttagttgagacaggtttcaccatcttggccaggctggtctggaactcctgacctcaggtgatccacctgcctcggcctcccaaagtgatgggattacaggcgtcagccaccatgcccggcctgattttgaaaaagaatagggactgtgtgcagttacatataaattcttatttttgaactcttgtgtgttcagctggcttgtatcaactacaccagggttagccttgattctggaagggtggattcagacttcagctcagttgtacatagtgtcttcagcctaagtgagaaactttatgcactatcttaattttttgaagcttctagtggtaataattgctggctttttttttttttttttggtagaaacagagtcttgctctgtcgccaggctggagtgcagtggcacgaaatcagctcactgcaacctctgcctcccaggttcaagcaattctcctgcctcagcctcctgagtagctgagattacaggcgtgtgccaccacacccagctaatttcttttgtattttagtagagacggggtttcactgtgctgcccaggctggtcttgaactcctaaggtcagacagtccgcccaccttgccctcctaaagtgctaggattacaggcatgagccaccgtgcctggcttatggctagctttctttacattgattgtgaagtcagatattggtagtagaacatcataattttagattgggttttgtgtttatttagcactgcactactctagtggtgtatttttctggacagattttatctgcatagttaacgcagttatatataaggcctaccgttacagaatccccataccttgtttgtcagtgtaaatcgaggaccttcatgcgaggtctttaatttattcaataagtaggaatatatatttgacagttactaaattctactgccttgtccttaagatctacatacttttttttgttttttgagtcagagagtctcgctctgttgctcaggctggagtgcagtgatgcgatctcagctcactgcaacctctaccccgtggcctcaagcgatacttctgcctcagcctcctgagtagctgggattacaggcgcctgccaccacactcagctaattttttgtatttttaatagagatgcagtttcgctgtgttggtcagtctggtctcgaactcctggcctgaagtgatccacccgccttggcctcttgctgggattacagggaagagccactgcgcctggccaagatctactcacttttagacagcaatatatgctctgtattttggtttgcaattgtaattgtcattggaagagtttggcttttctgtcctgagatcaacgtgtctttaaaagaaggcagtgcagaaagttgttattttttgagcttcttggatcttttatttttttaacgtgaggaaattcctagcgtttctagatttgttgattgtgcttttaagttttggtttatagatttcaggaagtaacactaaagtttaccctactctcctcaaaaagtaagtaaaaagttctcttggctgggcgtggtggctcacgcctgtaaccccagcactttgggaggccgatggggtggatctcctgaggtcaggaattcgagaccagtctggccaacatggcaaaaccctgtctctactgaaaatacaacaacaaaaaaaaattagctggatgtggtggtgcttacgtgtagtcccagctacttgggaggctgaggcaggagaattgttcgaacccagcaggcagaggttgtggtaagccaggattgcaccattgggctccagcctggaagacagagccaagactccgtcttaaagttctcttaatggaaaaatgaagaacataatagcaacataagttatttgctttcattgtggttatttctacaggacagggcaggggaagcacagataggttaaaaaaaattgtagcatcatgagctagggggaaatccaatgtagaaatggcatgaactttcttccagccgactcatgttcgtttcctagagtgatgacattgctcgatgattgaaaagaggttgaactgagcagttaattatataaagttagaaattccaaagaagtagtaactaccagaaattctccagcagtatcagtcaagacttgtggccaaatacggcttccattcttcatgagggaaaggccatggaaaggctgtcacattgcccagtgcagatgttgacttggtttgtggaagcgcagcgtggacaaggaatgaatatacactaataggagtggaataacctttttcttttacctatttgaataaattaagtaaaagttttaatcagaagacttaaagaggagtcgattttatcttttgattgcactaagcttaaatataaggttgcactttaagaattctgtagtttaataatcatattcttataagacatagatttgtaacaaatagtgattggtaataaaatttcagtcagtatcagattatgccagtaccttgaatttcttcccggttgagcctttctcagctaaagatgtcattcaggaaaggaagtttagaggattttagacacagctggttgcctttatattagtagttttgttcctcatatacatagagacttaggacagaatagtaaaagaagtgataatgacattttatcataacagtcaaaaccttcatagcagcttatccttgacactgagtggcaactattgttaaggtttttacacaacctttatctttttttttttttttttttttttttttttttttttgagacggagttttgctcttgttgcccaggctggagtgcaatggcgcaatctcggctcactgcaacttccgcctcccgggttcaagcgactctcctgcttcagcctcccgagtagctgggattacaggcatgcacgcccggctaattttgtatttttagtagagaggggtttctccatgttggtcaggctcttctcgaattcctgacctcaggtgatccgcccgccttggcctcccaaagtgctgggattacatgtgtgagccaccgagcccagccaacctttatcatttttaaaaaggtcccttagagccttaggctccactttcttcctcagctgccacatccaaaccatgggtaagcgatgcttgatctgcctccaagttcaagcagtccaggaaacagcccacttatgttcactgtccagtccccattcttggtccaggccaccatggatggctcctggactgtagcaacagcttccatgtgtgtctgccttgactgagtccctggcgtcctcaggcttcctgccacactgcagttggaggcttcttctaaaatccagtgctttctgggcaatttaaaacctgtgactttccaagtaggatctagtccccatgtccttaacaagaagaggtaacgtatttccctatgccactgcccacttatttttttattgttgagatgggatcgtgctttgtcacctaggctgggtggagtggtgtgatcacagctcactgctgccctgaattcctgggctgaagggatcctcttgcttcagcctcctgagtagctgggactacaggcaagagccaccacttatttttgaattttttgtggaaacaaggtctccctatgttgcccaggctggtcttgaactcctgggctcagcgatcctcccacctcaggcccctgtgctgggattatagcctcctgtgctgggattacaggcctaagccactgcaccaggcttttattttttaatttaaaaaaatttatttttttgagacagggtctcactttgtccctcagactggatgcactggtgcaatcttgtttcactgcagccttgacctccctcctgggttcaagtgatcctcgtgcctcagccccccaagtagctgagactactgctgcacaccgccacacccacctaatttttgtatttttagtagagaacgggtttctccatgttggcccagctggtcttgaactcctgggctcaagcgatccacccacctcagcctcccaaagtgctaggattacaggcatgagccaccatgcctggcctaaaaatatttttttcagctctagaaatgttagctcttttgctgtacatttccagagctgctttaataatgacagttatcacacgcataatttcatgtgatgattgcattcttaatttttaaatttaacaactgcacttacttcatgaggtcttgttcattgatacatctttagcacctagtgtgcttctggtgtagcacacggttgatataaattgaaattgaattaatgctcacagtagtttggggatggagctggtagttctgcattaattttgcaggtgaaaaaaaaaggcatgaggaagttgaaacttgccaaaaaatacagccagtacgtgctagaattggccctgggtctcaaatctgggcttctgactccaaagcttaggctcctgctcatacaggtttattttcacattctaagcttttaacgaaatgtatgtccaatgagtcatttctgtttagaaagcctttaggagttggaagctacttcctggtgatgtaatgtttgactctctaaagtctttggaatggggagttccaacttttgttaagccctcaataatgtcatgagtgaatgaatattggcaagactggctgggcctgtaatctgccttgagtgtgagggaaaatggaaaagcgcttaactttatggtgaattctaatttatagtagttgagattgaacgacaaaaatcttaaaattatgatgctgatgtgtcattgtgaccttggtaaactgacagcacagcagagagaagggctcattaaggagagcacttggctaactgaaccctcaggatgccagagacttgaattctcatgtaagcccttaagcttgccttgtcaatgctgtaaaaattggagacctttatgttttgctaatgatgtggtgaccttagttattaggtgatagcctcttgaaaaacattccaggtggttgggagactttcagccaccactcttctgcctggcggcacactggtaatattaggattagtctctacccattgccagttgtgcaggtggtgctcctttctctgaagtatttctacacacttctctgtttggcaagtttaactcccatcgtctctgagctgttaattaaatgtctgggatgtattgtgatagtccctgcttatagacttatggtgctgtgtgaggattggggctgggggaggtggcatttaaatacagctgaatcaatgtgatggcagttacgtgtggtagtttattgactaagcactttctctcaagagaacagtcattgctgattgccataggggaggctgtagggatgtggtgggattttgagctgtcccacttaaggcagcagaataagttacttaaagaggaaggctgtgtttgtatattagtgttaattaaaatacctttaggctgggtgtggtggctccagcctgtaatcccagcactttgggaggtccaggtgggcggatcacttgaggtcaggagttcgagaccagcctggccaacatggcgaaaacccatctctactaaaaatacaaaaaaattatccaggcgtggtggtggacagctgtaatcccagctacttgggaggctgaggcaggagaatcgcttgaacctgggaggcagaggttgcagtgagccaagatggtgcctctgcactgcactccagctggggcgacagcacgagactcggtctcaaaaaaaaaaaaaaaagaaaaaaaagaaaaaaagaaaatatcttcaggatcaaacttaagattcttgatgagaggctctacagatgttcacagaagagacgtgaagttttaaaatcttgtttctcttgagtcttgtagctaggtgacaactgtttcttgactattaatgctaacaccgggtacctaaacagaatgtgatggctcctgactctatctttctgagaaattctagtttgtttactttaaatttcagggtaccaatgtgtatgtggtgataaagggttatagaaaacattttctttaatgctaagtatgtgatgtatatgccttgattttttttctctagaaattattttaacttaatagtgaaagctaagattacattcatgttgactaagcaaccttttttctctttctctttagagctgtaggtaaaacttgcctactgatcagttacacaaccaatgcatttcctggagaatatatccctactgtgtaagtatcttaaattgggaattaacctgtttgtgttacgggtttcacatttctttgaccatttgttttgctgtaaagccatctttaatcctcatatgaacagatactaattttttcttaaacattcactgaaacctaattataaggtatattaggcttttaaaaaatagggctgggggtggtgatctcagcactttgggagactgaggcgggtggatcaactgagggtcaggagttcgagaccagcatggtcaacgtgatgaaaccccatctctactaaaaatacaaaaaattagccaggtgtggtggcgggtgcctgtaatcccacatacttgggaggctgaggcaggagaatcactcgaaccgtggaggcggaggttgcagtgagccaagatcacgccactgcactccagcctgggcaatgagagcgaaactccatctcaaaagaaaaaaaaaaaagaaacttagggtaatataaacttttcacaactttgctagttgatttttagacatccagaaagcaaactttaactgtctgtgaggtacagagactggatgatgttaaagaaaaccatagttggacacaagaactctgaccaaaagtctgatcagaaacagtccttgtcagtgcacgagtttcagatacactggctttctgggaactggaaagggaaagattccattacgttttaattggccttttctgataagtcatcagttggttacatgtccgcattgaggtgtagggctttggaattgaaacttgggtgtgtgtgttgaagggggaatgggagggtggaattggctattgaattgcttactccctataggcagcagaattgggtggagacaggaaagtgctgctctggtgatgggttacccgggagcgcacgtagctgagcctcataatgcaccatcctgcagctgctgtgagtcctccctgtgcaggctggggaggtgtcgcctcctccccacctgtgttcacctcctcaggcacaacacacacccaggtgctctctgaagtgtcgtacccatgtttttgttgttgttgttgttgttttccttttttttttttttttttggagttagtctctctctcttgcccaggatggagtgctgtgatgcgatctcagctcactgcagcgtctgcctcctgggttcaagtgattctctgcctcagcctcccaggtagctgtgattacaggcatacaccaccacacctggctaatttttgtttctttagtagagacgggtttcaccatgttggccaggttggtctcaaactcctgacctcaggtgatctgcccacttcagcctcccaaagtgctgggattacaggcgtgagccacggcacccattttttactgtaagtggaatcatgctgtccctgttgtcctaaatttatgggggagattttccttatctacatatgtagataaaggtttaatcattaatgattaatgattttgaagtactataactgatttaacccactggtcacttggactcttggtgttaacaaacattgctgggttcagtgttgtcccttatgtctttgtgtacacttgatagattattagaagcaaaatcgtgccaaatcaaaagacaatggatgttttaaattttggtagatacagctgggcgtgattgctcacgcctgtaatcccagcactttgggaggccaagacggaaggatcacttgaggtcaggagttcgagaccaacctggccaacatgttaaaacccccacctctgctaaaaatacagtagttagccgggtgtggtggtgcactcctgtagtcccagctactcaggaggctgaggcatgagaattgcttgaacccgggaagcagaggttgcagtgagccaagattgtgccactgcacttcagcctgggtaacagagtgagactctgtctcccaaaaaaaaaaaaaaattaaaaaattattttttggtagataactaccaaattgctgtctataaagctgtcactttgctggccttgacttaagtggcctcttagtacacactgccattaacgtgggttgaagttatctaaccgttttcatttccaatcacagatgtggttaaaatcttttgaattttttttttttttaattaaaaaagtttgctcacgcctgtaatcccagcacttggggaggctgagctgggcggatcactgaggtaaggagtttgagaccaacttggccaagatggtgaaaccctgtctctactaaaaatacaaaaattagctgggcatggtggcacatgactataatcccagctattcgggaggctgaggcaggaggattgcttgaacctgggaggtggaggttgcagtgagccaagattgtgcctctgcactccagcctgggcaacagaacaagacattgtctccaaaaaagaaaaaaaaaatatgtgtttttgtagagctatgttttgctatattgcccaggctggtcttgaagacctggcctcaggtgattctccaccttggtctcccgaagtgttgggattacaggcgtgagccaccacacctggctcttttgaatgtttactgtacatttttagtctcttgtgaattgtctgtttaaatcttttgtatttttctactgaaattttttcttactgatggaacatttccttccttccttccctccctccctctctccctcccttcctcccttcctttcttccctccctcctcctctccctccctctctccctccttccctcctctcctactccttccctccttccctccttccttctcctttcttttcccctccctcccttgctccctccctccctccctttttttttttttttttttttgagatggggtcttgcagtattgcccaggccggacttgaagtactggtccttccacctcagcctattgagtagcatgctccactgcacgtagcctgatggaacgttttgtaaataatcctcagtctgtcatttgtctttgtacttcattatggtgtcttctgccatatagaaatttagcatttaatgtaaataataccaccttacccgggcacggtggctcacacctgtaattccagcactttgggaagctgaggtgggcgcattatgaggtcaggagatcaagaccagcctgatcaacatggtgaaaccccatctctactaaaaatacaaaaattaaccgggcatggtggcgtgcacctgtaatcccagctcctcaggaggctgaggcaggagaatcacttgaacccaggaggtggaggttgcagtgagccgagatcgcaccactgcactccagcctgggtgacagtgagattctgtctcaaaaaaaaaataataataataatgataataccacctctccctcagaattgtatgttgtacttagaaaggcctttcctacttaaataatgcaaaagtatgctctagtatttttttctaggatttttgtggctaaaatttttatctttaattcatttaggacttatttttggtatagaatgaggcaaggacctgattctttttcccttatggggaaaaaaagtcacaatactatttatccaataatttttttcttatggaaatataattaacatgtccatcaccatcacaccttttctttcttcttcttcttttttcttgagaccgagtttcgcacttgttgcccaggccggagtgcagtggcgcaacttggcccactgcaacctctgcttcccgggttcaagcgattctcttgcctcagcctcccaagtagctgggactacaggtgcctgtcaccacgccctggctaatttttgcatttttagtagacacaaagtttcgtcatgttggccaggctggtctcgaactcttgacctcaggtgatccgcccacctcggcctcccaaagtgctgggattacaggcgtgagccaccgtgcccagcctctgctttttattatatttttcctttttttttttttcttttttgccttcctgtgcagaggaaacactattttcttctaaagcttggtttctgctgaccagtagcaatttttaacatcagtctgatttccctctgtcagcctataggctttgctgggttatctctcctgactaatttgtgtagcaacttcacatgaatttaaacatttgtatcatcagttaacactcactttgaaaatgttattgggaggcttgttaagtcaggtgtattttgtgtgactgctctacactcaggccttctggaaaccctgcagagggtagctctagtggccagctagctctcttgctgaaaatgagcaacataagtacatgaaaaacccaacaagtaggatttgaaagcggggctaattgtacccttatttcttctggggataaaagtcttaaactttgtttaaagtaaaatgtttttatttctgacggtgatttgtttcacttaaatagcttgttgtttgtttctttcatttctcttaagttttgggttgggtttggtttgtttcccgcaagttttgcccgtgccgccttcctccttgtgcctgcagggacatttgctggtgtggcagcctccaggcccgtccccagcctttttcttggcacaccttctctaggatggctgggacagtgacttagcttctacacctgtgactaaccattttcattccattctacagctttgacaattattctgccaatgttatggtagatggaaaaccggtgaatctgggcttatgggatacagctggacaagaagattatgacagattacgccccctatcctatccgcaaacagtaaggattgcagctgacttttaatgtgtcttttagagtatataattctcgagcgcttaattagtgcatgttacctatggacttgcttatattgccatcatttgggtattgagtaaatagcaaacagggtgggattggttccatgtaaacatccccctagatgcaagcccaggggttttgtgttttgagcgttaccagctgttccattgttgggcattttacagtcttccatttagctttagaataaccgtatgaaagagctactttttgtttttgcaaaccagtttttaacaccaattagtttgaaggcaggtttgctgtgtgacatttttgtaccacagaatcaaattaggcagttaagattcaggtttctttaaaccaagttagtaactaatctcacaggtttaatacattttttcccacaaaatacataatttgtatggattttgtgaaccatacaatagaacctaaatttattcaatgtagattgaagttttggttttgtaaaatgtatccactgtgtctaatcagaaaaaaaagtttacttttgcttctgtatcagacaactaagtgatttatttaccaaagctaattagagcagtagctggtgaaaatgggtacttagaagacattgttgtcattaaaagttacttttctttaagcagcggttttacttgtgtatcatttgcttatcttgttacatgtttgttcttcatttttaaaagtatctttggaagcaaaagttaaatatgcttgagattccttgggttgataacctgtgtgcatgtcctagctctgtgacttcaggcaggcttcatcctctctccagtctttgcctgtttccttgtagggtgagatgagtacgtgtcacgcacgcataacagtcctgggcacatagcacacactgtggggccagccgctgtcagaattctcctgttcctcagtgtgcgggtgggtcggcctaaagagtgctgctttccacgttgtgcccaaatgagtggaagttgtgtggtgctcagcacacctgggttggccggagggattggggttggggttgggttgaggtcaggaagacatcctagagaaaggctggctttgagccctgattgatgatgaggcagcctgtgattgattcaaccagtacttcgttgtagggggtaatatgggtgaaataacttagtggttaagtctgctgtattaaaaatcagtctataatccccagacaattcaaattcttcagtatcttaggaaactcttctatacccagtggatgtttaataattcagattgtaaatggatttaaaaacatactggctggtagagtaggagacttcagcccactggacacatgtggaagggtgtggtgtcattctgagaaacaagagccaccctgctgtgactcagggggtaccgggcagggtgaggcctctctaaggaaggcctcacagtaagtcaagggtgacttggcaggagtcccactttgtgttctgaggaacacacagataaggaaagagaactctcctcagcttgaacaaagctgtagagtgtgacgcctggtatcaaagtaggtgttgtcctcatagggctagaacttaaacttcatgtttcctctgtgtgagactgtggactgctttcctataaaatatttgaggagcaaggagggagtgggacatggttcttgccctcaggtagttcacagaaaagtcccataaactgtgtaagacaccctgtgctagcaagggggtgagccgggcgcttaaggagcaagaggggcgagcacccacccagcagtggaagcattcctgtctggactccttcagagataaggaaattatcttgacaactcaggggcaggccacagatgctcagataccagtgtctggaaggtctcatccctttgagccacactgtcctaagaagaactggatctggtagtaacatgctggcacctgggtctcttgttgataaaggggaaacctctaaattttgtactacatggaatgtggtccctgattgctggctctgtggtctgcagacctgttgatgtagctcatccaagactgcttagacactctcctgaaggaccagttggaagatttcttatctagggtgtcctaaaaagagatgttacatttcttgtggtcatttaacattggcatcctctctattgggcagctctgtcgggctaagtctgttcagaccattcatttcttcttcgttctccaaaagatggtgagcaggtagtcgccattcttagttgaaattgcccttcaggtttttatttcccgaattacgtaatccttacattattttctcttgaaaatctttgctaagttctgcatactcatcttcagttgctatgcacagaatcaagtcttgtcagagtaacgctcaagtccagcatcttcccttgtgtagatcacctgtatttatttgcctgcttgtaccagcattggtggtgtgagtgggagcctaagtgacctgtcagtgtcacagcgagtcctgagccctgtgtgtgtcctgagactcaggctgtgcagcgggttcgctgagatgctgagcctccatgttggggtcagccaggaccccagtgcgtcatgccagttgtttcattttctctctaggctaaaagttgttgttgttgttgttgttgtttgagacagagtttcgctcttgttgcccaggctggagtgcaatggtgtgatcttggctcactgcaacctccgcttcccaggttcaagtgactttcccgccctagtctctcaagtagctgggactacaggcatgtgctaccatgcctggctaattttgttttgtattttattttttttgagacggagtcttgctctgtcgcccaggctggagtgcaatggtgcgatcttggctcactgcaagcttcacctcctgggttcacgccattctcctgcctcagcctcccaagtagctgggactacaggcgcccgccaccacacctgactaattttttatatttttagtagagacggggtttcaccatgttagccaggatggtcttgatctcctgagcttgtgatccgcccgccttggcctccccaagtgctgggattacaaattttgtatttttagtagagacgggggtttctccactttggtcaggctggtctccaactcctgacctcaggtgatccgcctgcctctgcctcccaaagtgctgggattacaggcgtgagccactacgcctggccagtgctagaggttttaaagtggtgggctagactcctgtgatggtagataaaaagaaaaactgtggtgttcagcttggcagttttgagtttcaaaaggcctcagcttttgtgaggttggctgttacaagtgcagccagagagcaccaggcacacacatgtggttccgcagaactagagttgttactcttcgccgcgagggaaacacgcacctggggactgtgggaattcggccctcactcttactggccgggagcaggggatatttggtgatttttgtggtttgtatgatgatcttggatttgtcactacttagaaacgattatgagttgttttttttaaagtttacttacttttggtcctatttcagcacagtcacacaggtgaccttctctgatgttagtgttctgcgagattattctattcaatagtaacacctccaccagggcgaagctgcgagtgccaggctggttctcatacgtcagggctgcctgacccttttacaggattacaggcgtgagccactgcgcctggccagaatgtctgtgtgttttaaaattccaaacttgaaagtaaaatccaggtggatagcatttggaagagaataaaacgaagtagaaacaacactacttttttgtagtgagatctcagctgtccagatgcccgccctgtcttactccatggaaagtggacccatctgttgtggatggttccaccagtgggcaggaggctgtgggaagagcagccctggctacacttaccaccgaggagggagtggtgtgtgatgcaggagtaacaaaggcgttgaaggcaccacgtgtgtaacaggcacgcgggagtctgggttagtcagaaaggggaaagcagtgctcaggttgactggaaacataggccggtgaccggagacagcctgaggctccagaacacacaagtgacctgtgaggaaggaaactgagagaccctggagagacaccggtggtgccctctcaggtcctcttgagtgttacgaggacggggaagaaatagagcctcccagccagggtcagccagcacagcctctgtatgtgaagcgtcaggacagcgacggccgggaggaggggatgctaggaagtgagtaccagaagcactagacagggttttgggaagctatatttagctggggacgaagaaggaacaaggaaggaacaggcagatggcatagcacgaacgccgggtggaaagtggaactgctcgctcctgtcgtgtgtgtctcttctccatcaaaaaagaggctcttaaaaatcgaaagcatgccacagatacgatcagaggctctttggaagctgcatttttgtaactggttctcgatgatcctctcccatggtaaagatttggcaccatatgaagtccttgggaggacaaatcttcaacagtagcccatagatgaaacccagatagctgtggaaactaatgtgctctttgaatgttaagtcaggaaagcttgagtggcctggcacggtggctcacgcctgtaatcccagcactttgggaggccgaggtgggcggatcacgaggtcaggagatcgagaccatcctggctaacacgttgaaacctcgtctctactaaaaatacaaaaaattagccgggcgtggtggcgggcacctgtggtcccagctactcgggaggctgaggcagggagaatggtgtgaacctgggaggcggagcttgcagtgagccaagatcgtgccactgcactccagcctgggcgacagagcgagactccctctcaaaaacaaaaaaaaaaaaaaaaaagaaaagaaaccccgtctctactaaaaatacaaaaaatttagctgggcgcagtggcggatacctgtagtcccagctactggggatgctgaggcaggagaatggcgtgaacccgggaggtggagcttgcagtgagccgagatcgcgccactgcactccagcctgggcgacagagcgagactctgtctcaaaaaaaaaaaagaaaaaaaagaaaaaaagaaaagcttgagtgagatgaaattaaaataattttctcattttgagacagggtctcgctctgtcacccagactggagtgcagtgtcacaatctcgcctcactgcaacctccacctcccgggttcaagcagttctctgcctcagcctcccgagtagctgggattacaggtgcctgccaccatgcccggctaattttttgtatttttagtagacacagggtttcaccatcttggccaggttggccttgaactcctgacctcgtgatccacctgcctcggcctcccaaggtgttgggattagaggcgtgagcgcttttcttaaaagagttccagggttctatgttggaagagcgagtttgtcagtttttattggaacaaagaaatgaattgacagcattgtgataaacactggaagtgtcacttctaaaatttgtccatggctgaaagtggtggctcatgcctgtaatcccagcacgttgggaagccaaggtgggtggagcacctgaggtcaagagtttgagaccagcctggccaacatggtgaaacctggtctctactaaaaatacaaaaaattagctgggcgtggtggtgtgtgcctgtagtcccagctacttgggaggctaaggcaggagaatcgcttgaacccaggaggcagaggttgcagtgagctgagatctcaccattgcactccagcctgggcaacagagcaagactccgtctcaaaaacgcttgtccttaaggggtggcttcccccagacctacaaagtagcccagaattggaggtcttagtgtcagcaacagtgctgattttgataatgcaagtctgtacattcaaaccagtctcccagaactaggtggaagataggaacatttctgcataggagacttggaatgttctggcagcattaaaaccctgaggcccggctatgttctgggagagccctttggcaggcatcatttacagacgggtccttttcctgtatgctgtggcttcaactaggctgtgtctgagaactcggatggagcacttgaaagtgcccgtggctcccgcctgcctttgcggtaagggacagtgcagaacatctccggctgtgccagctgttgtagattctggtgggtgctgccatgggaggaggagcacgttgttgccccccctcaggatctccctgacctctgtcttcaccatcgttgaacttaacgcctgcttttgaccaggtagcgtggagtgtttcagtggcatttgtcatcgaagatatgttagaatctattgtatgcttttggatctctccggagggttaagacaaaattctaataaagaatcgataagaggttatattgatttttgttgtcctcagtctgtactaaactcaaaccaagttctcatgcattactaggttggagaaacgtacggtaaggatataacctcccggggcaaagacaagccgattgccgtatgtaaaactttcagtccacttcagtttcaagctttctctgttctctcatttcacttcgttttcctaggattttttattaagcctcaagctccttgagtgttttatatttaattcactcaaggttggggttttgcttgatgaaataaacttcattagagtgtgatagtttacccaccggcttgaattaaagcagtttgtgaactgtgatcttctcctcccaagtgaaaggaggggacagtgagagggcccctctcctggctggttggagatgcagatatggagactcctcccggaagcccacctggctgtgagccgagccggagcaggactaaccttgttgccggggccttctttctccgcttgggtgtcccgtgtggtggggctgtctgggcgtggctgtgcagtgctgctgagctaaccccaccgtgcttgagatggtgtgctgggtgccgcggtgattcttggacgagcttgtgcatgcgccagcattcttcaaatgccagttataaaaagctgttgtgtgggatgtttctttccctttcaggtacaaggtatcagctggagggttgaaagtgtagcttgggaattgtgtgcatttcataaagtagcataattgcctttttccaggagaatattttagaaatctagcattttagaattcttgggcatttttaaatacaggtgaatatttgaatttggtttgacacaaaatacagaatggatgaagcatgcagatgtttggcgtgtgccccgaagcaccctctactctgtcctctgcacccaccctttgcgcctctgcgtcagccacagctgccccgggagcgagttctcctgaggccctggctgtgctgactctagggcagcgtgagggtggttgtcagctgtgaaggtgccacttacacactaagtcctccttccttgtggagggaagggctcaagtagcaaatattggagcccccgcttggtgctgggagctgtgacaggcagctcctgaagaagcagtttaattggaaccagtgaccatctaaaactgtttgtactctaaaccagattttacagaaatattggaatcatacctttatacttgattttttcattttagatagttaggcgtaaaggaagcctcctgagggtctggtctgatcctcctgatccttgaagagcttccagcatcattctcccttcatgctccccattttcataagtaactggtggcttgacatgctgggtttggtttgggagccctctgacaaactgaaagggtggatcaggaagcgtctgaccacaccactggtagacacgctctgcgtccaacaagtccttcccagcaacatgtagaaagcaaagtgcatgcttcattctaaggttgttgtctaaatgtttccctgtgtttcctttttgtaggatgtgttcttaatttgcttttcccttgtgagtcctgcatcatttgaaaatgtccgtgcaaaggtaggtggggatttaaaatgtgtatgtaagttatagaatgatcctctcagaaataaatactttaaaatatcacttagcctaggaatttttagttatttaaattggttttagcaatttgctacttaagtacatgattgggtttttttttttcttttgagacggaggtctcactctgttgtgtccaggctggagttgtagtggtgacatcagagctcactgtagccttgaactcctgggctcaaacagttctcctgccccagcctcctgagttgctgggaccataaatgtgcaccaccatgcgtggctaatcttaaaagaatttttgtatggctggttttgtagaccctggcttgtctcaaactcctgggttgaagtgatctttcagcttcagcctcccaaagtggtgggattatagctgtgagccactgcatctggcccatcagcagtttattttatttatttatttttgagagagtctttttttttgtttttgtttttgtttttgagatggagtttcactcttgttgcccaggctggagtgcagtgacgcaatcttggctcactgcaacttccgcctcctgggttcaagtgattctcatgcctcagcctcccgagtaactgggattacaggcatgcaccaccacgcccggctaattttgtatttttagtagaaatgtggtttctccacgtcagtcaggctggtctcgaactcccgacctcaggtgatccgcgcgtctcggcctcccaaagtgctgggattacaggcgtgggccaccgtgcccggctgagacagaatcttgcactgtcatccaagctggagtgcagtggcacaatcttgggtcactgcaacctccccctcccggttcaagcaattctcctgcctcagcctccttagtagctgggattacaggtgcccgccaacacacctggctaatttttgtacttttagtagagacggggtttcaccatgtttgccaggctggtctcgaacccctggcctcaagtgatccacccgccgcagactcccagagtgctgggatttcaggtgtgagccactatgcccggcctaatacgtggatttttaaagcttcaggttctggttcagaagtttcctgggtctcattaaaataatgaggcactcagaattggtctaataaaaataacgaccatttctttctactccagtctctttcacaaacttcttagtgaaaatgacaagtgaggcccttcagtaggggcattttcagtggagataatagcggcagacctgagaccttgggctaggtagtttattctcatttctgaacagatgatgaattttctcagatgaccctaagaaattgttttaccaaaaacaaagtgatctatttgctttgggaggaactcccttccttttgtttctcttcccttccccccttcccctgcggttgtagagcccgttctgtccggtcgtggttctgtccagccatgatccgggagtcctagcttgctaatggaacacctgagatgttccttatggctcaaggcttgaattgaaggtgggaaccacctgaagcctccgtggggaggccttgcctgaggttaggtgtctggcatgagtgccgccggctgggtgtgatttaggtgaaggacatctgtaaaggagcgtgtcacaacctctgttccttcttcacatctagtggtatcctgaggtgcggcaccactgtcccaacactcccatcatcctagtgggaactaaacttgatcttagggatgataaagacacgatcgagaaactgaaggagaagaagctgactcccatcacctatccgcagggtctagccatggctaaggagattggtatggaatcctgtgtttttcctcctccttgtacctcttttattgtagtgacagagactggagtccagtctgggaaaggagggtgtgtgtctcccactcagggcctggtgtactcttggggaaccagctggcaaggccctgtgggtcttaacgtcagcgttggaaggtggaagcagggctgggagccggcagaaggcgcccgggccccaggagctgcctcccgctggtggtgtgatcagaagagagtggggtcgagtgtacattgccgtgtggtcgtgtttcctgtaggtgctgtaaaatacctggagtgctcggcgctcacacagcgaggcctcaagacagtgtttgacgaagcgatccgagcagtcctctgcccgcctcccgtgaagaagaggaagagaaaatgcctgctgttgtaaatgtctcagcccctcgttcttggtcctgtcccttggaacctttgtacgctttgctcaaaaaaaaacaaaaaaaaaaaacaaaaaaaaaaaacaacggtggagccttcgcactcaatgccaactttttgttacagattaatttttccataaaaccattttttgaaccaatcagtaattttaaggttttgtttgttctaaatgtaagagttcagactcacattctattaaaatttagccctaaaatgacaagccttcttaaagccttatttttcaaaagcgccccccccattcttgttcagattaagagttgccaaaataccttctgaactacactgcattgttgtgccgagaacaccgagcactgaactttgcaaagaccttcgtctttgagaagacggtagcttctgcagttaggaggtgcagacacttgctctcctatgtagttctcagatgcgtaaagcagaacagcctcccgaatgaagcgttgccattgaactcaccagtgagttagcagcacgtgttcccgacataacattgtactgtaatggagtgagcgtagcagctcagctctttggatcagtctttgtgatttcatagcgagttttctgaccagcttttgcggagattttgaacagaactgctatttcctctaatgaagaattctgtttagctgtgggtgtgccgggtggggtgtgtgtgatcaaaggacaaagacagtattttgacaaaatacgaagtggagatttacactacattgtacaaggaatgaaagtgtcacgggtaaaaactctaaaaggttaatttctgtcaaatgcagtagatgatgaaagaaaggttggtattatcaggaaatgttttcttaagcttttcctttctcttacacctgccatgcctccccaaattgggcatttaattcatctttaaactggttgttctgttagtcgctaacttagtaagtgcttttcttatagaaccccttctgactgagcaatatgcctccttgtattataaaatctttctgataatgcattagaaggtttttttgtcgattagtaaaagtgctttccatgttactttattcagagctaataagtgctttccttagttttctagtaactaggtgtaaaaatcatgtgttgcagctttatagtttttaaaatattttagataattcttaaactatgaaccttcttaacatcactgtcttgccagattaccgacactgtcacttgaccaatactgaccctctttacctcgcccacgcggacacacgcctcctgtagtcgctttgcctattgatgttcctttgggtctgtgaggttctgtaaactgtgctagtgctgacgatgttctgtacaacttaactcactggcgagaatacagcgtgggacccttcagccactacaacagaattttttaaattgacagttgcagaattgtggagtgtttttacattgatcttttgctaatgcaattagcattatgttttgcatgtatgacttaataaatccttgaatcata

SEQ ID NO: 23 - DNA, 41986 bp, Homo sapiens
aatcttcgctctgaggtgctgtctcaccggtgagacctggaagcgggcgagtctcgtgctgtgtcggacctgcagcccctggccttccgccaccatggagtacctcatcggtatccaaggccccgactatgttcttgtcgcctccgaccgggtggccgccagcaatattgtccagatgaaggacggtgagaggaagcaggggaggcccggccaggcctggggtgtaggagcggccagaaggagtttgtcgggggttgaataagtaccagggaggatctgagagatggaagccggcctgccctgcccgtacttattttatttatttatttattttttcgagaggggtttcgctcttgttgtccaggccggagtgcaatggcgcgatctcggcttagcacagtctttgtctcccgggttcaagcgattctcgtgcctcagcctcccgagtagctgggaacagatatgcgccaccacgcctggctaatttttgtattattagtagagatgtggatttctccatattggtcaggctggtctcgaactcccgacctcaggagatccgcccgtctcggccttccaaagtgctgggattacaggcgaaacaggcagacaggtctgggaccttggcatttgctcctccagggctcctgggtcagtgctctgctctggccttcgctaaatgcttcttgcttggtgagagttgcctaaagggaatcagtttataaatgtttaagcgcctgcccagagcctggctctctagatccccgaatctctgataagtttcctggtgtcgctagtaatgaggttagtttgttggcggcataaggtgggatcctgaggagagtgagactgtgggactggctctctagatccccgaatctctgataagtttcctggtgtcgctagtaatgaggttagtttgttggcggcataaggtgggatcctggggagagtgagactgtgggaccagaagcttggcattttccttcttcccgtggctcccgattcttcttttccagttttccagagcaatggctgccaggttttccttatatttaagtagttaatggagttaagagattggagccctgtcatttatttgccttatgagtttgtataagttattttgcagtgcccagatttcctcatctttaagattagcaataccaaactcacaaacttgtcgggaggatttagtaaatgagttatgtgcaaatccttagcactaggcaggtacttaataatactaagtgtacgtaggtgcccaaacatatttgtcaaatgaccattaagtcatctgaaccaaagcttaatactttttcaacagtagcacgtctttgatcagttaaggaaaacaaacttagattctgcagaaaaacaaccaaaatcttcttaaaattatgtattgagtaatttagtatagatagtatagtatagtatagtatagtatagtatagtatagtatattatagtacttaggggcaaaatgtctggactcactgcataggttgaacccaggttctgccacttgtgaccttaagcaaatttctctaactccgtgccctagagctaacatctataaggtggtaatgtaatagcacctatctcaaaaggttaatgaattaatgtaaatcacttaacatagcaccttatactttatgaaattctatgattagtttgtagaagttttgtttgtaagccagtccttccaaaggagtgaatttgttttgagagtaaatttgtccattattttgaatactaaggtctttgacaagcaagtgattttaacattaagtcatgtctaggtagaacaataatcattatctttacaggtcttttgtttcatcccaaatgtatgtgaaatcacattgaaaagtagaatgtgctttaagcctacttatgtacacagtacttttagtcattataggggatgcagtatattacttataacccatagaagagtccaagacattaagaaaacaaggaaataaatgctgcaagatgattttatataataaaagaagtattactagttagtagtaggttggtttttaaattaatgagttcaagagcaaatcctaagagtaataaaagaaagataactatggtatgggagaaagatgaatttgagttagttcttgaaaaataattggaaatagttgcactctgcacattccaattttccctatagtcttttctggtataaaacaaattataatagaaattttagtattgtatgatgacttttttatttattttatttatttatttttgagacagagtctcgctctgtcacccaggctggagtgcaatggcgcgatctcggctcactgcaacctccacctcctgggttcaagcgattctcctgcctcggccttccaagtagctgggattacaggcgcccgtcaccatgcccagctaatttttgtatttttagtagaaacggggtttcaccagtttggccaggctggtctcaaactcctgacctcaggtgatccacctgcctccgcctcccaaagtgctgggattacaggcgtgagccaccgtgcccagccgtctgatgacttttttctaatcattcatttcacgatggagcttgtttagagtaggcaagaatgctgaaaaaatagtaaccttctgggactcctttctccaagtataaaatgataatacaacttccaatcaattgtccagtatgtcactttgtaaaaacattttgatactatagagtagacatttgctgaggattgccaccttattaagtggtataacttttggtttgcttatatgccgcatttcatgtctcttttctcttggcctatgtagaattgcttttaagttactcggagtactccagcccacacagaattctctcttttctgaattcctatagcatgtataatccgaactacattatctaacactgagtatcataatattggacatgtatagaattcattagtttttctcacttgtgagttagacaggggtaagtcatattattaacatttcacacatttggaaataacatttcacacatctggaaactggggcttagagaggacaagtaatttgccgaagttcagagtgccaagtccacatcataaccaaggtctcttggattctagttcagttggttttccacagtatgacatgctaatgttgttcattttgttggccatttgtttcatgtatgtggatctcgtaagttcctcgtcaagaatcagaaattccccagagctacacaggcagtttcctgtacaactcaggggtctctaagtatctatctcttgtgtttttattaaatatgttgccctctgctactcattggacatattcagtgtttaaaaaacatttttggccttgtattaagctaattttaaagttgaacaggttactgcctaggattttagcctttcttctaagtgtgacataagttctttgtaaacaagctcccccttcaaataaaaatatcttttttcttattataaaaataatgcgaacttattgaataatgctttcttataaaagtgaggcatgttaagtatagaagttttaggaaaaaccaacaagcaaaagaaggaaacgaaaactgcccatactcttaccactggcaagcacttagaatatacccttctgctcctttttctttgcatagataatataagtgaatgtttttcgtttattaacaagtttgcaaactaacaatctttaaatctagcctgcataacaaataaaagtgtgtttgtttaggagttttgaggcaatttgatattatctacaggtgcattttgtgtgttttttccctccaagtctaagaagccatattactggtatctacaactctgaaacacttgtaaagtatttgacagtagcattttgttctttaaatcctattaaaggattttggcatttcagaagctttcaaacaggaaacgtgtctcccagggaggattattcagcactatttgaaaaatgaaaagtgaaagtgaaagtgagataggaagatttaggccttttctgaagctgcagactgaatgtggagttttcttccttaggcaataactgtaacctgaatatttatttatctgtctaatctgaatgactctggttcagctagataagattagagtattaggatttttgtgaggtattttaaatagcttactgtcaaaatattcactagaatttttgctttggcaatcattttaattttctctttttctttggaagtggaatttgtttactttttaaagtgattaatattctcagttgattttctattctttcttgaaatggttccttaattttaattatagcaccagtccttttcatatatgcttttgtatgtgtataaatataataactaacatttgtagttgtggaaacattttagggctttgttatcatgagcctaaagataatcgccattggctggattccttcagtttcttctgtcgttctgttccttgcatttcaaatgcctttaaatgctttaaattgtattttcaattggtagctttcatgtatattctccaaccgaaattggcattacacaatatgctgatggtttaacatgaagagtgaaagagaaaaattgataccattacctattaaaatcttctaaaagcaataattagttaaattattcaatatacagtcgtcccttggtatctgtagggattggttccagaacccctgcagatacccaaatccatagatgcttaaagtccattatatacatggtatagtatttgcatattacctatgcaggtactcctgtgtacttcaaatcatctctagattatttataatacttaatatgacataagtgctatgtaaatagttgttataccatattgtttagggaataatgaccagaaaaaaagtcagtacatgttcaggatagatgcaagcatccatttttttttttttctgaataattttgatccatagtttgttgaattgtggattcagaatccatgtatatggaaggccaactgtagtaattaataaacctgtttatggttacataaataatgacggtcaatgtctgttaaggcagtttctaacacagttttcttctttgagcagatcatgacaagatgtttaagatgagtgaaaagatattactcctgtgtgttggagaggctggagacactgtacagtttgcagaatatattcagaaaaacgtgcaactttataagatgcgaaatggtgggtaagacttacagttttagttggcatatgagtttactagggctgccattactaaagtcacagactgggtggcttaaacaacagaaatgtattttctcacagttctagatgttagaagtcaaagattaaggtgttggcagcgttgatttctgaggcctctctccttggcttgcagatagccatcttctccctgtgtcttcacgtgatttttctctttgtactatatccaaattttctcttctaagaataccagtcatgttgaattaggaactcattttaatttaataacctcttaaggatcccttctccaaatacagtcacatactaaagtactagggattaagacttcaacatatgaatttttggtggacaaaattcagcctataacaattggtttgtctttaaatttgaactgaaaaataatattctttaagacttatgtggtcatattttcttttttttttttttttttttttttgagacggagtctcgctctgttgcccaggctggagtgcaatggcgcgatctctgcttactgcaacctccgcctcccaggttcaagcgattctcctgtctcagcctcctgagtagctgggactacaggcacgcaccaccacgtccagctaatttttgtatttttagtagagacagggtttcaccacgttgaccaggatggtctccatctcttgaccttgtgatctgcccacctcggcctcccaaagtgctgggattacaggcgtgagccaccacgcccagcccatattttcattagagttttctgtgtttaagaagttgtctagaccctaaagattctaatccttcataaaagattttctacaaaaatcctagagcagagaactgttgtaacactgatagctgatagataaaactaacaccatcggcctggtatgatggctcatgcctgtaatcccagcaattggggaggacaaggtgggaggatcacttgagaccaggagtttaagactagcctgagcaatgtagtgacacctcatctctacaaaaaaaaaaaaaattttttttttttttgagatggagtttcactcttgttgtccaggctggagtgcagtggcacaatctcggctcaccgcaacctctgccttccaggttcaagcaatcctcctgcctcagcctcccaagtagctgggattacaggcatgtgccaccacgcctggctaattttgtatttttagtagagacagggtttctccatgttggtcaggctggtctcaaactcatgacctcagatgatctgcccacctcggcctcccaaagttctgggattacaggtgtgagccaccacgcccggccttctacaaaaaagtttttaaaaattagctgagtgtggtggcatgcacctatagccctagctactcaggaggctgaggcaggaagatcgtttgagcccaggaggtcgaggctgcagtgagttatgattgtgccactgtactctggaaggcagcaagactctgtctctaaaaaaaatttttttaaaccaaccaaaaaaaaaaaaacccaacaccatcttggaggtagggatggtagtatcagactttttaagtgttagatatctcagaggatgtggtttgagtttaaaagtatctgaacctggccaggcacagtggctagcacctgtaatcccagcacttttgagaggctgagatgggaggatcacttgaggtcaggagtttgaaaccagcctaggcaacaaagcaagaccctggctctataaaaaataaaaatatttacctgggtgcagtggtgcacacccatagtcccagctactcaggaagctgaagtgggaagatcacttgagcccaggagttcaaggtctcagtgagccatgatagtgccactgcactccagcctgtgcgacagagtgagaccctgtctcaaaacaaagaaacaaaaaaatctgaatctcagcgtcaaaaaacctaagtaaaccttggctttactattttttatgtgataagtcatttatcttctctgggactttattttccttatctctgaaatgaattataatactaatgaataatacatatgaaaatattttgtaaacctaaagcattgtgtaactaactataagtatttactgtgccataaaagggttctgccttactctctggtaggtttccttctagagagataattaagacttttgtgaagtattttgtgagctctctctggggctaatgaactcttatccactgggaaaacctccctagcaaacgatactagccactaggcctctgatccaggaatgtttgtagtggtggtctggcagagaaaaccttatttccacttacctcacagttcaataacaacgttatacactgcactggtataatatggagctatgaaggaagttaatttgaatatacttgcatgtgtaaaatgaccaaagatctattcacatagtttgggcagtggatttagcatttgtattcaattccataaatacttttgagggcctcttctatggtaagcattctgcttaatacttaagagaattcaaagatgaataaggcttagtcctgacattcaggaacataaagtacatggtacttaggtttatgcaggtttagaatatttcaagaattctgcttttttttccagtggttccactttttgcctgcataacaaatgaagtatgtcagtaatgcttctgaagtccagtaggtactgtatgacttcactggctgtcctgagagagggagaagagtgaacaagagtagcaagagttgtttgttactgggttttagggtctaaagtcagtgcacagacaaaaactgtgtttggttaaaattgcccttaaagacccttaaattacctgccaagtacagttttgtgtatgtaactctatatagtaattcttatataagttaaagaactgagctaaaataagggaaagaaagagaaaatctatatgcagataatcaggcatgacttttctgcctttaggataatggtcagatcttcagtggtgtttagggggttaagtaaagaattgaatagtattcccacttgtctaggttccttctttttttttttttttcttttttgagtcagggtctcgttctgttgctcagattggagtgcagtggtgcagtctcagcccactgcaacttccagctcctgggtgcaagtgattctcgtgcctcagcctcctgagtagttgggattataggcatgcaccgccatgcctggctaattttttgtattttaagtagagacagagtttcgctatggtggccaggctggtcttaaactcctgtccccaggtgatccacccacctgggcctcccaaagtgttctgggattacaggtgtgagccactgtgcctggcctctttttttaaattattattattatttttgttgttgttgttgagacagggtctcactcctgtcgcctgggctggagtgcagtggcacaatcatggctcattgcagcctcgaattcccaggctcaggtgatccttccacctcagcctcccaactacctgggaaaacaggtgtgcaccaccacccctggctaatttttatatttttagtagagacggggtttcatcatgttgcccagaatggtcttaaactcctgggctcgagtgatctgcctgcctccgcttcccaaagtgctgtgattacaggcatgagccactgcacctggccaaggattgctttcattatgatttaatatgcactaatagacttgtgaggataaagtacaataatacatgtgaaaacactcagcatagaccctgaaacatagttgctgctcaataaatatttgttaggatttgaatctgaatctctcctaatttgacagtggtatttgaaatgttgtaagcaattacttaaccacactgctgtgtgtctttccatactgacattttctgtgtgggcccactgagttatggatcattcttgtgccttttggcactggtcccattctacagggggattaagctccaaagtgaatgcgttattacatgcacacctgatgctattcctctgggttgtacctttgttggtatgacaacttttatttttgaagttttaacacttgagatactctatttttaaaaatactgcagaatgatggaaatgttctttttctgtggcttatacttttgaaagtcatattatacttcttaataaagtaacatttaaaatatttttttaataaactatgactctgaggtagtcctaacttctagcctctcttttcccaatatcctttttgttcctgttttcgtttttttagagacagggtcttgctctgtcacccatgctgtagtgcagtggcacagtcataactcacttgaacttctggggtcaattgatcctctccactcagcctcctaagtagctgggattacaggcatgtaccaccatgcctagaaatttaaaaaaaaattttttttagagatgggggtctcactatgttgcccaggctagtctcaaactcctgggctcaagcgatcttcccaccttggcttcccaaagctctaggattacaggcatgagccactgtgactggcccccaatatcctttttaaaataaacttttaaaagattggcatctaagacgcctttctttttttttcacttcttgtgtattcgtgttcctttccttctacggcagaaaccacagtgtgttgatgaatgaatagtttaagcaaggctgctagaagtttcattccactatagaactggttctgtttgtggccaagaattgctgtcagtactaaccagctatttcatagctgttgcatgaggaaagggactagagtaggattgtacccctcagtctatgctttgtttactctgagtgtacaaaagatggtgggctttaggaacaggggtagtgaataatttggggcactgttattccttctgctttactttaagtatgactctttatctcttctaccaggatatgaattgtctcccacggcagcagctaacttcacacgccgaaacctggctgactgtcttcggagtcgggtaagtaatatatcagacattgttagatagagcagaaaaatcctttgtgcttcttttatattctcattatacatgagtagtatttttgcccttttttggccttccagaacccctcctgttgctacttgttcattcttaagtccaatgtctttgtgcacagttgttattaataggtacagcccaaagggcaaatattcattcccagagaattggttgggacacaccaatatgaaggcctgtgacaacttaccctttttttttccccctaaaaactattttttagagcagtgttaggttcacagcaaaattgagaagaagtataaagatttcccacattcctcctcacccacatgtatagcattccccattatcagcatcttccaccagggtgatacattgtcacaaatgatgagcctatattgacagtaatcacccaggtccatagtttacattagggtttacttttgctgttgtggatgttatgggtttggacaaatgtataatgacatgtatctaccattacaggatacagagtattttcactgccctaaaaatcctttgtactctacttattcatccttctccatccccacaactcctgacaaccactcatctttttactttctccatggttttgcctttcccatcatgtcatatagttggaatcatggattatgcagccttttcagattggcttcttttatttggtaatacacgtttaaggttaccctatgtcttttcatggcttgatagctcatttctttttaacattgaaaaatactccattgtctagatatactacaggttatttatccattcacctactgaaggacatcttggttgcttccaagttttggcaatatgaataaagctaatgtatacatccatgtgcaggtttttgtttgaacataagtttttttttgcgtaaataccaaggagtgtgattgctggatcatatagtaagagtacgtttagttttttcaaagtgtttttgtaacaaaccatattacttaatacctgtgactgaaagtctctatgtgttagtgaaagtagaactttgaaaataataattcagattatttttatttttatttttttgagatggagtttcactcttgttgcccaaactagagtgcaatggtgcaatcttggcttactggaacctctgcctcctgggttcaagtgattctcctgcctccatttcccaagtagctgggattacaggcatgcaccaccacgcccagctaattttgtatttttagcagacacggggtttctccatgttggtcaggtgtcaggctggtctcgaactcctgatctcaggtgatctgcccgccttggcctcccaaagtgctgggattacaggcgcgagccaccgcacctggccggtaatgtggatttttatctcgagattgcttatctgtgtttctctttttttctttttcttttttctttttttttttgagacggggtctcactccagttgcccaggctggagtgtagtggtgtgatctcagcttactgaagcctcaacttcccgggttcaggtgattctcccacctcagcctcccaagtagctgggactacaggtgtgcaccaccacatctggctaattttttgtatttttagtggaggcaggatttcaccatgtggcccaggctggtcttgaactcctggactcaagcaatctgctggccttggcctttcagggtgctgggattataggaatgagccactcactgtacctggcgtacttacctgtgtttttctatgactttttcccaaagcatacagcattgttcctccttacttattctagccttgttgctattctagagctgtctccatttcatcgacagcatgttaaaagatgcaacactaagttaaggattgaatgcattaaagattgtgtaggatgtgctaggaaagttcatatggttgctaaaggtgtgtgttattcccttcccacagggactaaataaatagagccttaccacgtgatctcaccccctgtgcctgtttacttatctatgaaatggagataacttcctaaccccacaggggtgccaggaaaatgaatgcttgtaaatcataatatttaacattcatgtgacttttgcccaaagcattttgcttaataatttaatctactcactattccactgagaaagatagtctctatcactgagatgaagtgaaaggcataaagtgtcaaagggactagctccaggtcacacagcaggtcagacaaagctaaaataatggtgccataattatttgactattctgcctttggttcttcagtagtgtttctagaacactgatgctattcatatttttattatggtttgagttttcatctgtacttgcttaaaataacaagttactttttttaaagttacttactacagatctataaagcagtttattttctagtgcctaataatctttgactgataatttctcaataaatagtacctctcagtgctagctttgaccaagggcttgtacaatctgagggatcatgaagtttgaagagaagctagagacatgtaggattgagaggaggaggcaaatttacatacattgttttgtcctgggtgaaagatcagtagtcttttctttaaaaaaaaaaaaaaaaatatatatatatatatatatatatatatatatatatttttttttttttttttttcttccaagaaagtcattgtcaccaagtggtcttttcttcactcctccttgagaaaggaaaatgggtcagatattagtttttctgtcacccagaagttcctgtggtgttcagcattttatgacttgccatgtacgatgttcctctgacttatcaggcagaaccggagtaagaattccagctttgggcacaataaatactgtgtcataaatatcacagacattaagtgaattaagctcctttttggaattgagataagaatggcagtgtgcttcatgcaaatgcagtgaatctggtttaatcttctcctagcagaaatgtttgatgtcttaacaaatatcccttgtagacagtgacatggggctctggtaaatattgactacctctgcctgagcttttccagtaggtccaatctctgctcccccatctccttatcaaaatagattcttagttctaaaatatgaatttatattttagtcgtcttattctgggaagagagatgatagtttgtcagtgttcctaataagtgcaaagtcaccaaatttagtatatttatatggtcacaccagttggcagatgtgactcattttgggtcagccagttaccatgtataacttctgtgtctgtagctcaaattgtttgatttctaatttgctctgtgtatgtgtggtggtttggttgggaggacatttactaccactgagtatataatgaatcttacataaactggttcattaaaatgtaggcaatttagcattgtggttaagagcatagtctctggaattggactacctgggtttgaatatttgcttactgacttactagctggatgtctttggacaaattctaagcttaatttccctacttaccaatttcaaaaagttattatgaagattaaataaggtaataatgcaaagctcttactttttttttgagacaggatctcactctgtcatctaggctggagtgcagtggtatgaccacagctctctgcagccccttgacctttcaggcccagatgatccttccacctcagcctccctggcagctgggactgtaggtgcataccactatgcctggctaattttttgtagagatggggtttctccatgttgccaggctggtcccgaactcctgggctcaagcaatcctcccgcttctgcttcccaaagtgctaggattacaggcatgagccaccatgcccagcccacttgtgtttttatgctgcgattgctgtttggtcaaagaagcaatttaatggctataagttagtttttcgtgagggatcatttgttgtgcttttttttttttttttttttttttgagatagggtctcgctctgtcacctaagaggtggcacagtcacagctcactgcagcctcaacctcccgggctcaaacaatactcccacttcagcctcccaaatagctggaactacaggcgccaagccaccatgctggtattgatagggaaaatagaagtaaaataacattgaacatatattatgtgctaggatttttctagatctacacagtccagtatggtagccaactagccacatggggctatttaaatttaagttaattaaaattaaataaaacttaaaattcagtttctggtggaaaatctcctggtagactttgcctgaatgctaaatcaacttttgttcttaaaaaaaaaaattctgttcctcagtcacagccacatttcaggtacccaatagccacaactattgtattagacatcacagatctggaacatatccatcatcatagaagttctcttggacagtgctattctaaatacttacatatgtatctgttattaagtatccttattatgacaccataagatgtgtgttatccccattttacttacaaggatgttaagtatttctcttagatatgtttccaaagcacatatatactatgttaaaggttaagattccagcttcaaatatcaaactctttcatggtgtcttctttattaattagtggactaatgtacaagtgtatttgtgcatttagggaaacatgaaatgttcagttttgttaaaatgtcgaaattgcacatagtattatatagataagtttgaatatatgtccattgtaggttttcaataagtgtttgctgaaaaagtgtcatccagctaggtctatatattctgctgagaatattaattatgcatttatacactggaagggaattcttaatgaatggaataccggaagaagtattcttaataaatggatgttaatttgtataggaattaaaggcatgaaatcatcagaagacgaaaaaagacagatggggaaaaaattcagaagccttcagtttagttgtttatttaaatgcttgtatacatttaagatggtctcttcttgttggttagaccccaaagagcagaaaaagggcttatactatgctcaaggcttgctttcttcggccaggcacagtggctcatgccggtaatcctagcactttgggaggccaagatggacagatcagttgagcccaggagttcaagaccagcctggccaacatggtgaaaccccatctctactaaaaatacaaaaaattagccagatgtggtggcacacacctgtaatcccagttactcaggaggctgacgcaggagaatagcttgaacccagaaggtggaggttgcagtgagctgagatcatgccactgcactccagcctgggtgacagagcaagactctgtctaaaaaaaaggcttcctttctcaaattctccttacagtttgactaatgtcagaggatgatgagttatggggctatttcttttcttttttttttttgagacggagtctcactgtgtcacccaggctggagtgcaggggcacgatctcggctcactgcaagctccacctcccgggttcatgccattctcctgcctcagcctcctgagtagctgggactacaggcgcccgtcaccatgcctggctacttttttgtatttttagtagagacggggtttcaccatgttgaccaggatggtctcgatctcttgacctcgtggtccacccgccttggcctcccaaagtgctaggattacaggcatgagccaccatgcccagcctatttcttacttaaaatgaattatgtggcatatttgatgtagcccatctgaatgccctaaaattatctccatttaacagatagagagacaggtataaaccaggcaaatctggtgtccttgggaacgtgaaattttgtggcaaggcttagagtaggatgctggcctccatgatgtgtaatcgtcgggtttcactgccacactggccaaagagttttcattagaactttttccgaagtgtttcatgagcctttggtaatttatctttttacctatttatttgtaaatgcttagcaagtaaacagtagaaataataagttgaaaagatatccagcctgatgtagtggttttcaaactttattctgtgaagctgcttcaggatactcaccaaggaagaccagtgtgcaatgcttttttttttttgaggtggagtttcgctctgtcacccaggctggagtgcagtggcatgatctcagcacactgcaacctccaccttccagtttcaagtgattcttcttcctcagcctcccgaatagctgggactacaggcgtgcaccaccatgcctggctaatttgtgtatttttagtagagacggggtttcatcgtgttagccaggatggtctcgatctcctgacctcgtgatccacccgcctcggcctcccaaagtgctgggattacaggcgtgagccaccgtgcctggcgtttttttgtttttgtttttgttttttttgagacagagtcttgctctctcacccagtctggaatgcagtggtgtaatctcggctcactgcaacctctgcctcctgggtttgagcaattctcctgcatcagcctcctgagtagctgggattacaggcatgcatcaccatgcctggctaatttttgtatttttcatagagacggggtttcaccatgttggccaggctggtctccaactcctgacctcaagtgatctgcccacctcagcctcccaaagtactgggattacaggcatgagccactgcacccagccaagtgttcagcactttagctctgcttcatatagctcaactcagcttttatctatttgatagataggaattctaggtaaagttttatttgaaaaggtgccatcactgttcccttaccaccaaagagccctgcaataggagggttaatactagctctgctgtgagttagttgaaaaccttgggagaaagcaagcatttgattggatggtttttagggtttgttccagcccccaaatagcatgatttaaaaatcttatgtcaagaccacaaccagacttgaatttttatttatttatttatttttttagggaatgggaaagaatatgtaggaaaggatttcaggtcttagtcatttccagcagtgaccaaagcttatccccacactctggccttaattcaaggctgtttggtctggttagtagtaggcatgtatagcatgctcctgtcctagaagaaacctgttgctttgagccttctattctgaccatgagaattattcttctcatgccttaggtggctggcacaaaggcatcatctgtttattggtatcagtgaggtcctgtgaacagatggcccaggtgaaaccctgactttgcaagtcttgtcccttatacactaccaaccatttgttacatgtgattgaaatatcactaacaagggtaatttcacatgatttttggcaaacgtggttagcaggatgtgacatgacgcagcactgccttcttcctccatgtgccatctcccttgaggcctcatcttctctacttgcccccgtctcacccatgccgaggcttgccttcagctcacctgctccagatgggcagcacagtgggaggacactggcaaaggcagatgtgtttattttccggagacaaaatgttgtgctgctgcagatggcagtgccttggagcaagaggcagcctttgacactgctgccacacagcctgggcatcttgacagacagagccagcttacttttggtgatgcggaaattcaaaaataaaaaacgaaaaccaagatgttcattatgcagctcttggactgtcagtgcaagcagcagcccttttagacctggggagcagttttcttccctaccaaaccttagtcagctagtgagctaactgtggattgtcactgtaggccaagagttacgtgtctgttcattacttttgtctcccagccttaacaggacataaagtaaaaactggaaacaaatggctacatttagatggatactcagtttggttctgcaaaacatatgtgtatcccaggtcccatctcacaggagtctcttaggattgggggtggctcatgttggccccattggagataccgctgttctgtttttagtggtcattttgattatccaaagacccagagacagatgtgccttgaagttgaggtgtctcaattaatatgacaacactttgtgcttatagtgtttttctactaggaggagtaagcattctgacagctgcccttttaagcagtatgcgtatgcattagttaaagcttgactaagtccattaggaagacaaagactggctgttgaatcattacacttactaggatcctaaaaaaaataacttgggaagattatttgaaagttactggctttatcaggaaatttttttttctttttctttctttttttttttttttaaatgtgctgtttttcctagccctagctagttaggagtttgcaggtgtaaagtcctccccctccccttccctgtctctctccagggggttgtatgtgagaaggtgttgctttctcactcagagagcatatatgtgctaccctgttggatgcctgctgcgagcccagagaacccccgtgctcattgaatggaataagcctattggatggctggaattttgcagccccataatgccaacttttcacttaaagcatctttcctatccacaatgggagtgaagcagtatatgtacttggtctagatttatattgttttaaaactcgtgtcttaaaaattttgtgatttcctattaaggtttggtttaagcctaaggcaggatagtgctgtgtctgcttagtaggaatgtgcttttacttttaaaatgtttactattagaagtgcagatttacccccaacttttaagattgctttaaatcacttgccccagtctgggtaggcataggtgtgggcatgccctcccacatactcacagatacaaacacacacaatatcctggcatcttggtgcctctttttacctgccctggcccaagatcatgtaggaatatgaatttaggggctgatctcaacaacctcatgaggttttctttactctctcccaaaaaacagttacctaaaatgaagggcagtgggaaggcttttcacaaggggaaaggtggatttttctatttcttgacctgagaggttgttacgtgtatatttactatgttcattcgctataccatgtatattttatgcttttttttttcttctttttgagacatagtctcgctctgtcgcccaggctggagtgcagtggtgctgtctaggctcactgcatcctctgcctcctgggttcaggcaattctcctgcctcagcctcccgagtagctgggcctacaggcacatgccaccatacctagctaatttttgtatttttagtagagatggggtttcactgtgttggccaggctcccgaccttgtgatgcatctgccttggcctcccaaagtgctgggattacaggcatgagccactacgcttggcctattttatgcatttttatgtgtatgagttatttcataaaaagctataagaaaatgaaaaggaagactaaaagggtgggaaaacatattactttttaacctaaaaatgaaaaaaaaagggccagatttaccattacttttgaatgtagacaacagagcaaataggattaactgattggaaagaagaaaggagataatagtctctgagtctttgtaaactgaaatgatccagcagaattctacacttccttttctgacgcttcctgatggatgtggtttcttacagccaggatgttccatacctgctgatattcattcagccagtctccagcctgcattgtccttggggctgaggaaacaaaggtgcacacctcaatgtgggccttcagatggagaaatggaggagtaaacagtcaattgcactgcagagtgacaagtgctaagatagccatatacacagggtactctgggagcacagagcctaacctgagcctcaaaggacttgctgtcatgaatgcaaagatgaaacaaaagggcaaactgaaagcacagaccaaggtgtttgagagtatgttaggttaggcacagtgatttgttaacagtagtcaaggcagggataaatacttctctgggcctcctcataagttcatctgttgtgggatactgtgtacaaaatagggctctactgattaaaaacaaatataaatatatatatttatttatttattttatactacatacataaaatcgataatctaaagtcagccgggcacagtggctcacacctgtaatcccagcactttgggaggccaaggcaggtggatcacctgaggccaggagttcgagaccagcctggccaacatggtgaaacccccgtctctgctaaaaatacaaaaattagctgggcatggtgacaggtgtctgtagtcctaggtactcgggaggccaaggcaggagaatcgcttgaacccaggaggcagaggggtttttttgttttttttttgagacagtcttgccttgtcgcccaggctggagtgcagtggcgcagtcttggctcactgcaagctctgcctcccgggttcacgccattctcctgcctcagcctcctgagtagctgggactacaggcacccgaggaggcagaggttttaatgagccaagattgtgccactgcactccagcctgggtgacagagcgagactctgtctctaaataaataaataaatacaagcagtgggcctctctggaagcctgttggctaagagggtgttagcatgatcagatgagattggtaagatcattagctcgttggctgttctttgatggagcatttggggaaagaatgaaggaagcggggagaccaatgaggggcctgcatgtcagttaaagccgtagcaataacttttgttggatctggggtgctaatggggaacatggttctaatagaagggctcctaaatagtcttttcctcagaatttccttaatactctatggatatctgaaaacatataccatcatatatagtcctaactactcttttctagaagaccatcttatttattagctcagagagatgaatcagctttgatgttcagaattcatagattagatattcatgggcatgcttagcatgcacaacttaatatatgccttgtagtgtgcaagcgtgtagcaaagcatggtttctgcatttgagatttttaaaaactgacttaacggtatatggaatcttaaattttcctagaatctgccagctcatgaaaaaaaaagaattcaagtgtccttgttgcaaacatggtgttggttttatcattgcacaatcagcaattttattttgacgttatttggggggaagcagtatttttgattagcaagtaaaattaatgtagaaaacaaatactgtgttaactatttggtataataaggcatctgtgccatgttgcatttcaactcattaaatttctaaacttctaattacgataagttacaactgtaataggaaaaccaatcaaacttggagtcattgatagctttagagaagtaaaatttatagtaactttggaattactgaggagacctttaaaatctaatttagttaaaaattgaaatatacacaatatttaaatttttttggttgtaaaattcacatttattgggcacctactacttagcaagtcttcttccaggaactttaacacgagtgagcacttgaattcctcacagctctgtcaagcaagcagtactgtcctccacattacagatggggcactcaagactccaagtggcctatctcaagtaacacaactgtaaggtgataaagccacattcgattttcattgctttgtcacagaagtacatgcctatcttatatgacttatggcatttaaaagcagagtttatccaagtagtaatttaaaggatgtttttcttttaaagtttaaaatattggttgtaaatgcagcaacattcctgagcttaagttcaagaactcaaccgttatatgagtttttaccagtgtattaagcaaaaacatttgaacatgagctaattgttattaaaggaaaacaaagacaatttttatatttttattttggatctgccagcatcaaacaggtataccaaatatactttcggagaatgacctaaggcaaggaaaagaaaaaggaaaaaattgtttagacagtctcattttcagagcagtgtttcttttattttgtcttggtcctctggaagtgaaaggtttgctttgtttgaggcacacttgcctccttatttcccagtatagtatgagaatttataaacgtgggccagtttgttttttagtgctacaaaaaataaatgcatttggaacaggaaagaacaagaaagtcaggtgtttaactttttgtttgtgaagctcattatagtattctgattttgatcagtttacatttgtactttttttccgtcacaagattaagagaaaattgttttcaacttccaattccataccttctccactctgagtggcaactgtagataacaggaccctaaccggccctgggttctctctcgcacctctgcttttgtcattccagcactttgctagtcttcccccttgaatgcaccaacatcctaacgtggctcgctcttcagttccagttaaactcagcgtttatcagggaagttttttctgtatttgctcccccaccccccaccacatatgtcaccctcaatttcttatggcaacttaggtatacctttgccatagtgtcccgttgtaatcattttctttactttcttccatgtgcgagtgtgagactgtatgtgttcatatgaatgaaactcttcactggctggctcttcattcagtctcatgacctgggttatacactattttctcttcccatctgtctttggacaactgtgcttaagctcattaggtccaaattgagctcttttcagttggactgccactgtcccccttattgagagtcctcactcttctttctccctcacctcttctactgttatgaagttccatcatttctaccttctaaatatatctcatatttcatacctctctctccgccccctctactttttccttagtttggtcctcatcgtctgtctagagtagactattgtagatcctctaaccatccgcccttcctctcagtcctaatcccggtctatctttcatgtaactgtcaattaccatcctaaaatggcaatctgttttgtatttcctttctaaaagtcttctatttaagagaagcagggaaaatggctgggacatcagggttccttggcaccaattaaccaatgtgctatgtcatgaaaaaaggcttggatcagcagagggatggaagtggcaaatgttcactggttgctgtatggtttacatactaatgtaaatattctttaggaggccagtgacagtgtcatcccagtttctctccctacttcctgctgaagtcacctaattctccaggtgtatgtgtcccatgttcaccagtatccagacattccatattcctctgtttctttgtcttcacgtatactgtttcctctatctggagtccttcctatccacatctaccttatgagtgccttccagatccagactcccatcttcatcatgtcgcatgatgcttctcatacaataaatgctaaataaacatttattgaacttattcacattccaaatgtggaaatgaagttagttgggacatctgcccatttaataattattctatgttgtagtcccagggaactcatggaatttggttgaaggcttttataaactgtgtattttttacttaaagctaaaagagattgaatctacacatgggtttccttaaaaaggaatatagccaagaggattaaagtcagggtacaaggccgggcatgatgggtcatgccggtaatcccagcactttgggaggccgaggtagatggatcacttgaggtcaggagttcgagaccagccaggccaacacggtgaaaccctgtctctactaaaaatacaaaattagcctggcgtggtggcgtgcgcctgttataccagctactccagaggctgaggcaggaaaaccacttgaacccgggaggtggaggttgcagtgagccgagatcatgccactgtactctagcctgggcaacagaacaaaactctgtctcaaaaaaaaagtcagggtataaatgattccatattgcttaggtagttctctacccgcttccccatccatagaaccatagtcttttagagctaggaaaggtactaggtcacaataattggaagttgctgaaatctttgagatttttttaggtgtttgaaatagtggattccaattcacatatgaagtccttctttaattaaaatagcaaaattgaaattgagattttaaaattataccaccaaacccacccaaaaaagatagctagtgaatttttttagttatggcaaacaaagtccagagttcagaacattagtgtaagaaaataacaattgattcattttatttattagtgaaattgaaaaattggggattggcaaagcagttaaggtgttggtaatctatcatcatgggtatttattgaactaccacatagttttagatcctatagaggagtcgtaattgtatgatattttaaacttgctgttttaaaacttaaaatattaggtagacatggaggcacccacctgtagtcccagctacttgggaagctaaggtaggattcccttgagcccaggagtttgaggctatagtgtgctgtgattgcacctgtggatagccactgcacttgcttgggcaaaatagcaagaccttgtctcccaaaataaacaaacaaaatccttaaaatgttattggtcatataaagatgtgataagtgaaatagagagcagtagatgctagtatgcaaaatagtgcattctgaaatatatgagtgtgaaactgcatttacataccaaatcatatttttacactaatttccattttgtggaggcagcatgatttcctggaaaagcatgtaggacttgcagttgggaggcctgaattctggacctgacccttgatgctaattacctgtgtggtttagggcaagttactgtttcctctttgaagtttagtccccacatttgtaaaagggatactgggtaaactagttgaggttttctatcctatctaagtctgtaaattgcattttcatgaaatcctctcagtgctaaagatggaattttaggcagttttgacaatcccctggactaaaagaaatagcagatgtactgttcctttcaaagtccagtctctgtttagtatatttagaagtctgtttatgaaaacactcatctctagacaaactcatttgtctcattggtggttctgcatcttcttccaaattactgacctcacacactgcttagcattccaaggtgcaacacatcaaaaaagaaattgcaccattctccaaagcacctcactcatagcagtgtcgtcccattcaattagaggtggcaaaggctggcctggctccaaaggaagactgtcaattcctctctttttctgtgtccacgcttggcaggatgcttcctcacgcccacctctctcccccttgctgtgactttagcttccgccagatgtcacaccgctgcttgtcaccgctcagactcttgtcgctgattttgttgtttcagtgtatttatcacaaccattctctttagctgtaaaatttatggaatttcacgctcttagttactacagtgtttctttttcataagagagggaatatacaaggagtcatatgcacaagagttggagggaagggaacacttaatctaacttaagtaaagtttgcctgtgtgcagtgcacactcgccacccccaaatgtagaagagtccaaagtggcactgagctcagttctgtgggactcagatgctcagaagtttttaagaagtctatttcagtctcggaaagaagtacataagagatgtgcttatcagccaattcccctgtcttcttaaatttgatcttttagtaaccaacaaaagttggacaattttattggctctctgtagcccacttcttgatcttactatctagtcaaatctgttgataatgcagtcaaatcctaaaagtggtggtggtagtgttgtggtaatagtcaatctgcattattacaatatatcaggcattgcactgagcactttacatgtatttatctaaaccttaccacaaccttataatgatgggtacttttattatccttattatacagatgaagaaatctcaaaatgacctaaatgcacttcactgtgaaaataaactcatgtactcattaaaggaggaaaagatacatttgtctagtttcgtcctcaccccaccctcactgccttctattaagaggcaaaattttggtggtacctcatgctagaagctgaagttcattctgaattcccaggctggttcatttaaaattttttctttgtatatcaattagacacaactttaaacatgttggtgtttgcattgcagaccattgatggtgattgccaagacctttgggtagagagtatcttagctaaatgtttgggttcacttggatgaatgtttggatatttaggttaattcaatactatatataatgttcagtcttagcttatggtgtggaagaagcctagtcttgtatgttgcagttcttccccttggggacctcaaaactttgtcttactacttagacttactatctaaacaattagaatagtggagacaaccaaaggctagattatatcatgtacagaatagagatttcattttaaaagattcttggtaatctttgcgaaggattactttgtaagagattctttgtcaagaggatcactggcagtgctctcattattgattaatgttttcatttccccagataattaggcaaatccttaagtatgtaacatcatggggaactaagggaactgatgaaaaactgtctagaaagtagctttaccactcagagtagacacatttggaagggaagaaatgacatggttagggagggttgaccatgaagtagatatgctctacgtgtctagtacaaatgcttgtgacactgaacaccattaccctagggcccctggaaagagtcccaggaatgagagaggaggaaactcatttactgactgcttttctaccatgtgtcaggcactgtgctgggcactaacatccttccatatccctttatgaagacacataggaatttccctcgtatctcagtgccagaagtagttgggcttctcctgagtacttgcattgtttatagagtctttactgtttcgggcattacacttattatccacatgcattatcttttggaatcctcactgcagcaacccttttgtagtagggatcatcccatgttttaaatgagaaattaaaattcagagagattaaatgactaacttttctaaagtcacagcccaactctttcttatttatttatgctattggtctcctctttgttcagttctgaatgcctggcctgtatcctaagcttttctttacttagcaccctgtgtctagagggaggtagaaagagaaggacccaagcctagcaaaaagcaacaatagatgtacattcatggagatgctggcagttgacttaaacttgaaccacttctcagaagtagcacttattgctttctcacatttgtttagtgacttttctttttatttggtagaaatagggtcttactctgttgctagtcagtctgtagtacagtggggggatcatagttcactgtatgccggggcttaaggatcctcctgcctcagccttccaagtagccccctaacctagatttttttttttttttcccatagagacagggtcttgccatcttgcctacactggtcttgaactcctaggctcaagcagtcctctcaccttggcctcccaaagtgcgggattacaggcatgggccactgtgctcagccaagccagagatctttggtggagcattgtcagaagaattttacaaactgcaagttgttgcacagatgtattgatttaattagtctagataacaccatttatttatgcttaagcatctcacacatgcaaaagttggtaattcaaagtcacacaataatttgtgagttatcttcaataccaggagttgtagcttctgaataccaactttggtaagtatatgtgtgcgtcagatgcctaagcatgagtaaatgatactatatagaccaattaagtgatggagtttgcttctgaaattctgttgacatcctatttcatctaaaattttctggtagtggattttaaataacatttattgttctaaacaatttaatctcatagtatggacaagatcttcattgaagacaaaacatctgggttctaacaaggcctctttgagtatctgggggaatacttaatataccattgcaacttgatgaaattgtcttggctaagtatacagtgagtgttctggctagttagtagagaagagtagagattatcctcttagcaaaaagatttaacttactttgtgataggtaaaagactgtattattaattctcttggggagggataccagtttctctttgctattctgcctcttttcctccctctttctctcttctaattttaactgtaagaacaccaaggtattctatgtctgccagattttgcagtactgttttcacacttatatataactaatagcatttttaaaatctgtagctaatttaagcaggtttgttgttgtttaaagtgataagctttcaaaaagagactgggatgtagttatgtagtaggaattttggtagcatcttttcttccagagtttgggttgttttaccgttattattttttctcattatatttcctagaagatagaaaggagaaagattaattaacccagttttacatgttaaaaaaaaaaaaacccagaagctcataggggttaagttttttgcctaaggtcagctttactaagaaggtactcagaatgcacagagaattccagagcttggcagagtgccgcacgctactcattgggaaatacaataggcagataattattttctcagaagtcttgactgctggtcaacttatttctctctgggactacccactgtcctatcactaaaacagaaacttatttggaggtgaggactactctgtaatctccaggcgatgttaggaaccctttctacttagcacagctggcttagaattccaagtaagtatataatatgagtttcatgctaggcacggtggctcaagactgtcatcccagcactttgggaggccaaggtggaaggattacttgagcctagaagttgaaggccagcctgggcaacatagtgagaccccatctctctctctctctctctccttttttttttggagatagagtcttgctctattgcccaggctggagtggtgcagtagcactatctcggctcactgcagcctctgcctcccaggttcaggcgattctcatgcctcagcctcccaagtagctgggattataggctcgtgccaccacgcatggctaatttttgtatttttcgtagagacaatatttcaccatgttggccaggctggtctcaaactcctaacctcaagtaatctgcccgcctcggcctcccaaagtgctgggattacaggcatgagccaccgtgcccggccaagacttcatctcttaaaaaaataataataaatcagcagggcatggtggtaggtgcctatagtcgtagctgctcaggaggctgaggtgggaaattcacttgagcctaggagtttgaggctgcagcgagctatgattgcaccactgcactccagcctgggcgacagaacaaaagcctgttactcccctcccaacccctccccccaaaaaaagcaaaaaccatgagttttttaaggctgccaagtggccgtgttaatcagtgttcaaagaatgttaaatgccacttttaggaccattagctattacacttcatgcttcataatgaggtgtctcacttactgtgcgtttaattaaatacatagacaaatttagggatggggacatatccatgggcaaggcctgcttactacccgctgaagcaaaggcaagaggagaaacacatcctgcagagaaaaagaaagccatataaaatggaagtcccacccctgatgcctgggggcatagacagactgaatttaacatggtaaatggcgcagctggtgtagaaaaaaaaaatcatccatttggagatgaagagcaacgcagactcagtcatggttctctataaaacttatgtttttagatttgcaggtaatacaaagaaaggatacctataaatccaagttataattattttttgttgctttttatttgtctcaaaattacttttcagttaagtctggtgatttgatttaaatatttgagacttatggccgggcgcagtggctcacgcctgtaatcccagcactttgggaggccgaggcgggcggatcacgaggtcaggagttcgagaccaacctggccaacatgatgaagccctgtctctactaaaaatacgaaaattagccgggtgtggtggagggcgcctgtcatcccagctacttgggaggctgaggcaggagaatcgcttgaacctgggaggtagaggttgcggtgagccaagatcgcaccattgctctccagcctgggggacaagagccagactccgtctcaaaaaaacaaaaaaacaacaacaaagaaagagacttactatccctccctacctcatgagttgtttcttttctctctctttctctttttttttgaacccaggctggagttcagtggcacagtcatggctcatggtagccctgacctccttggttcaagtgatcctcccaccttagcctcctgagtagctgggaccacaggtgcgcgccatcatgcccggctaattttttagtttttttgtagaaaccaagtcccactgtgttacctaggctggtctgaaactcctgggctcaagcaagcctcccacctcagcttcccaaagtgctgagattatacctgtgagctactgtgcccagctataagttgtttctttagtagtgggcatgcagtttaccatttgggattggtccagatgcccagactgagtttgtttatttcatttgatgtggttggagcatctgcttttttcagtcagtggcctggcattctcagaattgttcgttggtttcaacaattaggaatgacaaaagagcacctatgctttgcctttgcagtgcttgcaaaatttttttttattttaaatttttgtgcgttcatcgtatgtgtgtatatatatattgggtatatgggatattttgatacaggcatacaatgtgtaataatcacatcagggtaaatggggtatctctcacctcaatcatttctcctttgtgtgacagacaacccaattatactcttttagttattttaaaatatacagttaagctattattaactatagtcactctgttttgctatcaaatactttttgaagaagtgcttttatacaggttctcatccatagactttaagaagatggcagctttttcatataccttaaagtgctccaaatgcccttcctttcaaagagaacaagctgacgtcccttgacctgttaccatactccaggtcctctagatttccctacatttttactttcattgtgatttactcagttgctgctaatattttctttctcatgaagagtcagaatattctcatttgccatgggaagagatgttggtgttctgctttagttatcactttgccatatcttttctttgcagaccccatatcatgtgaacctcctcctggctggctatgatgagcatgaagggccagcgctgtattacatggactacctggcagccttggccaaggccccttttgcagcccacggctatggtgccttcctgactctcagtatcctcgaccgatactacacaccgagtaagtattaatactctagggagggagcagtggcagagccctgccctcagctgcttcccaggtttgtccactcttggagttgggtggccagggcttgaataggatggatcctaagaagcataaccaggttcccctctggaagctgcactcttctgtcagtcagtagggtcttccaaaagctgatgtaagttctattttttgccattcaaaatgagatagtacatatctctagagctgggttttgttttgaaggaggattggaatagatgtcacagtgaataaaacatttttattgggttctaaaatccttcatttctaagagttcaagttttttcacttattttgctttgcctagatttttggcatctcagtaaagaatgagtgggtaaagcaagtagctgtatatttgtttggaacttgcaaggatgaacaggtccccagcatgacaactgaaggtttctttgcttaaacatcaaagctttctaaggctacaaatctgagccttcccttggttgtcacctaatggctgcctcctcttgaaagaaaaagccgtcgctctacttgtccgtaaagcgtcagtttggcaaaacttcagatacagggatgcttttttaaaattttattttttaattgacaaataataattgtacatatattcatagagtacatcatgatgtttcaatacatgtaatgtaaacagatcatggtagttagtatattgatcatctcaaacatttatcattttgtgttgggaacatttagtatcctccttctagctatttgaaactatatattgttagccatagtaattttacagtggtatagaacaatagaacttattcctctgtctatccataattttctatcttttttttttttttgaggcagagtctccctctgtcgcccaggctggagtgcagtggagtgatctcggctcacagcaacctccgcctcccaggttcaagcaattctcgtgcctcagcctcccaagtagatgggattacaggcgtgtgccaccacgcctggctagtttttgtattttttgtagagatggggtttcaccatgttggccaggctggtccagaactcctgacttcaagtgatccacccgccttgccctcccaaagtgttgggattacaggcgtgagccaccgtgtcctgccaatttcgtatcttttaacaaatgtcccccatcccttacagaggatttctcagcctctagtatcctctattctactttttacttctatgagatcagcttttttagcttctacatatgagtgagaacgtgcagtgttttaactttgttcttggcttatttcacttagcagaataccgtccagttccattcatgttgaatgacagtatttccttttttatggatgaatagtatttcatggtgtatatataccacattttctttatccattgatctgttctcggacacctaggttggttccatatcttggctattgtgaatagtgttgcagtaaacactggggtgcaatatttccccagtgatataatgatttcatccaatataatgatttcctttcttttggataaattcccagtagtgggattgccagatcatatggtagttctatttgtagttttttgagggaccgccatactgtcctccctagtggctatactagtttgcattcctaccaacagtgtataaagaatttccttttctctacatccttgccagcatttgttgttttttgtctttttgataatagctattcctaactgggatgaggtgttacctcattgtggttttgatttgcatttctgtgatgattagtgatgttgagaattttttccatatatttgttggccatttgtatgtcttttgaaatgtctgttgagatgatatgcccattttttaatgaatttttgttctctattgagatatttcggttccttatattttctggatattaactccctgttggatgagtagtttgcatgtattttctcccattctgtaggttgccttttcactcttgtttcctttgctgtgcagaagcattttagtttgatgtaatcctgtttgtttatttttgcttttgttgcctgtgttcatgagattattcataaaatctttttccagatcagtgtcctgaggctttttccctgtgttttcttctagtttctggtcttaaattgaggtctttgatccattttgagttgaattttgtatagggtaagaggtgagggtctggtttcattcttctgtgtatggatatccagtttttctagcaccatttattgaagagacagactgtcctttccccaatgagtgttcttggtaccttcatcaaaagtcaaatgtagatatgtggcttaatttcttaatttctctattctgtttaattggtctatgtgtctatttttatgccagtagcatactgttttggttactacaactttgtgatatattttgaagtctggtagtggtatcaactaccagatttgttctttttgttcaggattgctttagctattcagagtcttttgtggttccttacaaatcttaggatttttttccataattctgtgaggcatgtcattggcattttgatagggattgcattgaatatataaatttctttgggtagtgttgtcatcttcataatattaattcttctgatccatgagcatgagatgtatttccattcgcttgtatcctcttcagcttatttcatcagtgttttatagttttcgttatagaggtctttcatctccttggttaaatttattcctaggtattttattttctttgatttttgtgtctattgtaaatgggattgccttcttgatttctttttcagctagtttgtgtatagaaatactgatttttgtatattaattttgtatcctgcaactttatggaattcatttatcagatgtgagagttttctggtggggtctttaggtttttctatatagaagatcatgtcatctgcaaatagggacatttgacttcctgctttccaattggggtactctatttcctccccttgcctaagtgctctggttaggacttcctagacacagggatgcttttgtgctaagttccatcttctgaccccagtcctaacctcgactttagcctctgtgggcagtgggtactttggaattcttagcttttacagactatagatgaagcacagataaccacttctctccttacattccattcttcactgtcagtatcgtaagaatctggcatgttcattcttttttggtgctgccctctcgctcaaccttagccacgctagagctccaggccacatcctgaaaagaattagcctggcctcccagtgactttcttgatttggcatctgtcagtaatacagctgatttgcccaccaaaataactactagccacccctgaagcctgagtgcataacatgtcgtcccagtttgccacgcccacagacagttcctttggctcctatttggggagagtctcagccccatcctatgaattctcttcccattgttaaacagagacccagctgggaaaacaaggctgaaattctgaccccatcgtctctttccctgatttgcagctgactggggcagatggaattgattcaaaccctggactaagggggagtgaaaggggtgggttatgataaagagagacaggctgctggacttcttcagaggtgggccctggccaggggaggcagaattccttcatgctcaccctttactgtagcaaatcaatttgcaatggcttatagctgctggagcactgggtctggggcccccccagctgcatgtggagtaagttgattgcaggctagaaggcaaagcattttttgccttttacgtttgtgtggcactgagacctgaagaagccagatttggaacttaatcaaaagcttctgagagttggatataatgacagcaccggaagtatttggtctctgtgttctctttcagctatctcacgtgagagggcagtggaactccttaggaaatgtctggaggaggtgagtagttcccataggatcctgaaaggaatgtttgtctctctgtttgccagtgttgttcctgttcctcagttatattttttcagatttttgccagaaggtgtaatacatacccactaaccagatgtgaagttgctaccagggatagagtttggtgtggatagcaagctcacttttctctcacagattacctcctcaatgtcagttttataatttaattctttctggtttatccaaaccagtggttctcaaattttagtgtgtgtaagtatcacctgggaaacctgttaaacagattgccatctctgccccaaccctcaattctgagtccactgttctgaggtacaaactgggaagctctgctttaactggcagtcccaggtgattttcctacaggtggtaactgaggctgtacttgaagaacttctgctctagactttatttttttatttgagacggagtttcgcttttgttgcccaggctggagtgcagtggcacgatttcagctcactgcaacctccgcctctgggttcaagcaattctcttgccttagcctcccgagtagctgggattacagttgcccaccaccatgcccggctagttttttgtatttttagtagagacagggtttcaccatgttggccaggctggtcttgaactcctgacctcaggtgatccgcctgcctcggcctcccaaagtgctgggattacaggcatgagccaccacgcccatccctgccctagactttatacctgctctgttcttgtgccacctgtaattgccatactgcctgctcccttaatagtgctcgagtctttgtaatctgtgagaaaaagcctcccctaagaattcaggaggaccatagaaagcaactaggaagctttgggcagaaggggagagtagactttggcttgcgaggacaggattacagaacacaccctttctaacactactccttagagtctaaggctttgggtatagatggagaatgggggaatggggaggtcaaaaaccagccacattagtttttttcattcttttactgttcctgtggcttaaggatgaacttgacctcgtggtttagtaagagagtaggaagataagagcaggagcgttgggagtaatgtcagtttgcttcttacacaaaccttttgttttcagtccacagtgcccaccccaccccccgctttttttttttttttttaagagatggatctcactttgttgcccaggctggagtggagtgcagtggcaccatcatagctcactgcagcctggatttctggaactcaagcgatcctcccaagtagctgagactacagacaggcaccaccatgcccagctcattttatttttaagagatggggtcttgctatgttacctaggctggtcttgaactcctgggctcaagatattcttccacctcaacctcccaattacaggcctgagccacagctcctggcctctgcttcgttctgaggacaatcactctttgttagcttattatcttgagacattttaagagagacgtctgtgtttaccagactgatgggtaacagactatggggaacagaacactggattgtctcattctttcgtcagctgactgaccagagacaggctcttagttgcacctcccagttcagcctccctgcctcccagtcatcctccagctgctgtttgggtaccctctaccactagagtactagtgccctactgccaactgcctccagtagaatatcagttccacaaaagcagggatttttgtttgcttgtatccccagtgtctagaacagagcctggcacatagaacttagtaatcatttgttgactgatttcctccatgtctctctgcagctccagaaacgcttcatcctgaatctgccaaccttcagtgttcgaatcattgacaaaaatggcatccatgacctggataacatttccttccccaaacagggctcctaacatcatgtcctccctcccacttgccagggaacttttttttgatgggctcctttatttttttctactcttttcaggcgcactcttgataaatggttaattcagaataaaggtgactatggatataattgagccctctggtccaggtctcagtttacctaatattacctcagaaaggatatggagggaagatgatctttttgccaggtctgacttttcttcctgctccgccctccattaacgctcagtaccctttagcagctgacggccccacgttctactccatgcttggcttcctttccaactagctctttcatatattttacttgctagtatctccattctctctaaagtagtggttctttttgcccttaaacttaaatttttaaattaattaacctgaattaataatacatgcacttaatgtaacatgcaaacagtacaaaaacatgtagtgaaaaatatttcttccagagctgggtgtggtggctcatacctgtaatcccagcactttgggaggccgaggcgggcggatcacgaggtcaagagagcgagaccatcctgaccaacatggtaaaaccccgtctctactaaaaatacaaaaattagctgggcgtggtggcacgcacccctagtcccagctactggggaggctgagacaggagaatcggtcgaacccgggaggcagaggttgcagtgagcctagatcgcgccactgtactccagcctggcaacagagtgagactccgtctcaaaaaaagaaggaaaaatgtttcttccatccctataatccagtcatctgcttcctgcttcccttcctggaggaaacttcagctactaatttcttatgttttttaagagatattctgttactgtgtaaagtatacatacatacagacacatgccccctttaaattttttagatttatttatttatttagagacagggtctcactctagcccaggctggagtgctgtggcgtaatcttggctcactgcaacctccgcctcccgggcccaagtgatcctcccatctcagcctcctgagtagctaggattacaggcgcacaccaccaatgcccagctagtttttgtgtttttcatagagacagggtctcaccatgtcattcaggttggtcttgaactcctgggctcaagcagtctgcctgccttggcttcccagtgctgggattacaggcgtgagccaccgtgcccggctaaaaagtatttttaagttctgcatattgcttatttcacttaacactatattagagattgttttatatcaatacatatagatatgcttattcttgttgacagttgcataattttccattaaattgatgtatcatgggcagttaaccagttactcgttttactcttagcataactttagggaacaatgtggatgttttgtggttaaagctattaaaacagtggttcttgaccagatgtgtgtttcagaatgttcatctcacatttccagttgctactgatgctgctggtctaggaaccacatatcaaaaccatttggtctccgactaagataaaccctactttatccaattctgtgctcctcttaatatcatatacagataggtttttgttttgtctgtgattaaatgtatcatctaagatactacctactgatcataacgttcatattaaagtattgggttaacattagatttgggtgtcttatacactatttaatacgccaatgataaatgccttacaccataagaagaaagctaatcattgagtaaatgggagaaaagagatgattcacgtcactacagttgattcaacctccaacaccaccatgaatatgcataggtttgagcttttagctagattcctgagtgtaaggcatctattttaaaagtgccacaggttggccgggtgcggtggctcatgcctgtaatcccagcactttggccgcccgccgaggcgggcggatcacctgaggtcaggagttcaagaccagcctggccaacatggtgaaaccccatctctactaaaaaaatatataacaattagccaggcgtggtggcacacgcctgtaaacccaactacttgggaggctgaggcaggagaattgcttgagcccgggagagggaggttgcagtgagccgagatcatgccactgcactccagcctggctgacagagcaagactctgtctcaaaaaaaaaaaaaaaaaaaaaaaaaaagcgccacagatgattctgacgccctacccagtggagtgctgctactaaagcacagactatcctgctacatgattttcccatctgtacaatgactgaaatagcacctattctatgtggtagatatgagaattccatgaagtaatataggtaaacatttagttcagggcttggcatgtggtaagtgctcagtaagtgtataatgattggtaaacttgttattctgcattcaggcctcaccagggatgacatacggttctctgcctttgaatgtaagtgtccccagggcaatctcaggcaagcctgcaaacccatcctgactctcagtgtttttttgccaatctggatctctttcctgagctccaaatcaactcattcctagatagctcaccctccagatttagggacatcgaactcagtatgtctaaagctgagccttaccatctgcccctctccaaaccgcctctatgacattctgtcttagagaattagagctacctggtttcccaagtgcccaagtcagaaacccaggcatcatttatttttaataaatgttttattttggaataaatttggttttacagaaaagttgcaaagataatatggtgtccttataccccttattcagtttctgtaatgttaacatcttctatataccacagtatgtttgtcaaaactgagaaaccaacattggttggtgtattagtattactaagctccaggctttattcagattttaccagtttttccactaattttcttctgttctaggatataatccaagatacaacattgcatttagctgggcatcatttttatgccattctttatctcctgtctctacatggccaccaagttctggcatttctacatcctaaatcttttaattttattataattttttattgttgtttttcagagacagggtcttgctccatcacctaggctggagtacagtggcacgatcgtagcttactgcagtaagttcacttgaactcctgggctcaagtgaacctcttaccccagcctcccaactagctgggactagaggggtgcaccactgcacccagctaattttgtcaaaattttttgtagagacagggtctcgccatgttgcctaggctggtctcgaactcttggcctcaagtgatcctcccaccttggtctgccaaagcactgggattacagatgtgagccactgcacccagcctaatctttataaatctccatccccattactctggttcaccccctatcgtttcttagactatttaacagcctcctaacttcactctacttttaatctcttccctctccaggtctttctccatattttaaaaaactagtttcaccatccattcctctctgcccttaaaactttctggtggttttccatggcttaagagaataaagcccaattctttgatttgacatgctaggcattccataatcctctccgaacctaactccccacttcctttccctcctttacacctcataaagcctgtgttccaactaaa

SEQ ID NO: 24 - DNA, 17256 bp, Homo sapiens
gcagttaactccgccctgacccacccttcccgatgcagtccctgatgcaggctcccctcctgatcgccctgggcttgcttctcgcggcccctgcgcaagcccacctgaaaaaggtgagtgcaccctcttttaagagtctgtttgcagcctcctggcccagctacgggtgtgcgggtctggctgagatatgggggtggccactccgttctctagaattggttctctgcactagagccttccaaagtaactaattatgggattctggtctgtacaatgagggtggcctctaaagacttgttctgctccaggccctttttggagagattaatctcacgtctgcactctcctgccctccctccaagcgccggagtgaaaatgcagacagccttaaaactaaggcattgcccccagagattcagtcctgttaaccctgcaccttactcctgacccccactccttatgtcccccatgataaggcctgctgcctcatctcttcccctgctcgaatgccctgaggtcttcctgagagttgggagggtttgagagcttttccaggccagaggatccagatttgcccatctggtgacaaatacccaggcctgtgaccccgctgcccttggttatgagccactgagacaacagtccccgtaccctccaagcttcctccttcacttctcattgacaccgcttcttccttcacttctcattcacaccgtgctgcagatccctgggaaagggaagttctgtaatcccttcacctgaaaaagcctcgttcctggcttattgcagctagcccaatgtctttcagattcaatctatgttgttgcaaatgacaagatgttcccccttttaaaggctgaatagtattctgttgtgtatatatgccacattttctttatgcattcaatttgatggataatttcttcatcaagtgtctgttgatggataatttctttatccatcaagtgtctgttgatggacacttaggttatttccatatcttagctattgtgagtaatgctgcaatgaatatgggagtgcagatagcccttcgaaatgttgatttcagttcctttggatatatacccagaagtgggataatggctcatatggtagttctgttttattatctcatttatatgcggattctaaccaagttgaacttacagaagttgagagtagaggtggggtctcactctgtcacccaggctggagtgcagtggggcgattgtagctcactgcagccttaaactcctgggctcaagcagtcctcccacctcagtctcctgagtagctgggactgcaggtgtgggccaccaagttctgctaaggaataggctttgagatttattgcacaccagggtgactatcgtcagtaatgtattatatacagaagctccttaactttccatgaggttatgttctgataaacccatcataagttgaaaatgcatttaatacagctaacctgagaatcatagcctagcctaccttaaacatgcctagcctaccttaaacatgcccagaacatttacattagcctacagttgggcaatatcatctaacacaaagcctatttcataataaagtgttgaatgtctcatgtgatttactgaagactgtactgaaagtgaaaaacagtatggatactaaaagtacagtttctactgaatatttatcacttaggcacgattgtaaagttgaaaaatggtatgtcaaaccattgtaagtcaggaactgtgtgcatttcaaaacaactaagagaatacatttcacattgcagtgtaccccataaatgtatacaactatggtttgtcaatttaaaaaaaacccaagaccaggtgcggtggtgcacacctgtaatcccaggactttgggaggctgaggtggacagattgcttgagctcaggagttcaagaccagcctgggcaacatggtgaagccccatctctgcaaaaatacaaaaattagctgggcgtggtggtgtgcgccagtattcccagctacttgagaggctaaggtgagaggcccagctacgcctgaacctgggaggtcatggctacagctgagattgcaccactgcattccagcctgggtgacagagtgagaccctatctcacaaaaaaaccccaaaaacaaaaacccgattccattgcctcttggctgctagctgtggtcaagacatcacacatttctggtagcaaagggataggtccaaccctgatcccctcccttctaccatcttggaagtgtttgagagtgaggaacagtgctgtgtaggggaaagcgggtgatactgaaagcagggaggcttggcttctgatcattcccctgtctcaatccatggatttcctgagtcttgttctcctcatctgtaagatgggtgtgatggtgccaacgtgcatctcggggagttgtcggtgaagggaaatgcattcattgatggaaaatttctaaaatcagaaacaaataaagccatataaatctgtgggcttggcctcactctgcccccgaggcagaaagtctgttttgcttgttgaatgaaggaacgtggaccttttgacttcatttgcctggagaatttataccttgttcctgaatgttggctgagaatgcttctcttggctccagggctggccgctatgaggtggagtctggctagaggctgctagctcaccctacaaacttgttgtatatgctgtgggtatggatgccatctcagactaggtcttagattggcagttttgaagaggccctgagacattataaaggtcactcaaaatcacacagcacctacatcttcttggggctcatgtgattcagagccctgaccttgagtccctgggccagataaagatgggggtggggggtgacagtgaatgaacatcaggaaacctgaatttcagttcctcttctagcataactgatcttgtgactacaggctgtgatgggtgttagataacaggggaggatatctagccccatgctagtcatatagtaggtgcttaatagactctatagtgctgtatagtggctgtcatttgttgtacccatactatgtgctatgtactgggctatgtgcttttttcctaaaaaaaaatttggaataattttaggtttatagaatagttgcagcagggcgtggtggttcacccctataatccagcactgtgggagaccaaggcaggcaaatcacttgaggccaggagtttgagaccaacctgaacctggccaacatggtgaaaccctgtccatactaaaaatacaaaaattagccaggcatggtggcgtacacctgtagtcccagctacttgggaggctgaggcaggagaaatcacttgaacctaggaggcagaggttgcagtgagctgagatcacgctgctgcactccagcctggatgacagagtgagactctgtctcaagaaaaaaaaaaaaaaaagaaaagttacagagataatatagagtttctatatactcctgactcagttttccctgttagcatcttatatgtacatatctccaacactaagaaaccaacattagtacattactgttaactgaattctagactttatttggatttcaccagttttcccattaatgccctctttctgagccaggatccaatccagggtactgcactgccattgttgtcatgacacatataattgtagtcccccctctcctccagcctatgacagcttcttagtctttccttgtttattcatgagcttggcagtcttgaggagttgtgccctgtgctttctgtatacaaacatcttaccctcacaatagccctgtgagaagatatcattatgtccacataataaatgaggaaattttgaacccctagggggttaacttacccatggtcttagctagtaagactggctgagctgggttttaactcatacctgtagtacccatatctctgcctccagagctgtgcctttcccctccgtcttgtaccaccccttcccactagttggcctaggctggaatggcagatatctggtgaccagcctggccttggtgggcactgctaatccattacacctcccttccctgatgagcctggactcagcagcagaatttgtcactacagagacagctagccgggcattaccctcaggaagccatcttgttacgtctcccccagggcctggggaaagaagagcttaggagaggggaagggattcttctccggtaggtactctggataccctacccccacccccagcccagaatcaattctctgtgtggatcaggctgccttagaatctatgaaaacagccccacccagaaaactagtcctgctcctatgttgccctccagcctgactcttaattccaggcaatctttcccttgaccactttcagtctgttcacaaccacaaatcacagtgtagtactgtccttcagtggggttccactgcccctatagtaaatgcaacctcccgattatagcttgtggggtcctgcattaaatgaccctgctacccctccaacctcatctgggtccctcatctactacatttagcccatggccttctcccagtgcctggagcagccaagcttctttgtgcctcggggcctttgcctgagttccctcggcctgcacttacatgtctgactccgcatcctgcaagagcccggcttaagtatcacttccccaccaccctatgtaagtgagtcctttgttgctgtcagcattaccttctgctcttttcctttgtggcactcacaaatcatagtgggtgatatttatttgcattagacggtaagctcctcaaggcagggcaggagccaggtctgattgtttaccactcttgccacagcacttagcccagggcctatcatcattgctccataaatatttgtggaatgaatgttgaaggaaacatttagtggcaactatcctgtcctgcctttcttagtcatgacatgacctttcattccaaggggtaggaacccattcctaaaagctcaggtaaaggggaagtttattacagagctgcaagacatcccatggagctgccggcaggaagcggaggctaggacgctaatggctcctttagtgagccggctcccgtgttgtgcctggcattgggttatgagctttacatacacgctctcgcccttgcaacatcctggagaggaaggtagaaatgcctccagttaaaagatgtggaaatttagactccaaaggggaaactggcctataaaatcacatggtaagtgtggcagagctatgatttccacccagggctgtttggctaaagctgtcattcacccatgtctctccaaagccatgcccttcactgctactccatactgcttttatagatagggaagtgggacttgatctgttcccttttccacagaccaacagagcccttagcccttagccctaacttctgcttggtcatggatcacagatctagatggtctggcctcaacccaaaacttaggatccagtgacagcacaaaacccccatatccccagccttttataccttaattccaaaattgggcagagagaatctgtcagcctagctggggttaggtgatccctcttgaaagagtcagtgatgggagtgttgaaggtgggcatcagcttgggggtgtgggactggcaggttttctctctgagacagggtgtggatggagggcatgccaacagtctctcataggtggcctccagggggctgggagaggtgagagtgggtgggcagagagtcttcacagtgtgggaggtgttcaagatcatcagacagggtctgttggagtgcggagtggtggtcacatgcagtcacatgcagatgtagtggtggtggaatcaggagacctgggggatgtggaggaggaacaggagcagctcagcacaggggtggtgagtgatccaagtgggcatgtggcatgagaagagggatgggaagaagacactggttaggactggggaagtccactggggattattcatcagcaagtgatccactggggatcttttcatgagtgtcctattcctttctgagttaatcacctgccccttgagagtgggatttcagatgctgttagatttcccattgtgttttgtgtttcccattgttcctggctctgggttgggcacggggtgtgacatgaacaaggtcctgggtgtgggctgcagaggtgaatcctccaggagcttgccctctgctgggattccaaggctggctggagaggagtgggcagcagggaggtgggaagtcagagaaggtgcccaccaaaggccaattaggtcagtctcctgtttggaagttccaggtctatcatatcctgccttatagtttacaatacacttttgggagattatgtcttttgagtcttttagtttagtcctgcctataaaatgagtaggataagtgttatcccagcttcataggtatggagtctcatagatgaggctcagggacgggggtgcctcacccaaggtcactctgccaggagctcatttttcctgtgatctgtgatagtttcttttgtcaacctttttcttcttctccttccttgctgcctgattgtccccagccatcccagctcagtagcttttcctgggataactgtgatgaagggaaggaccctgcggtgatcagaagcctgactctggagcctgaccccatcatcgttcctggaaatgtgaccctcagtgtcatgggcagcaccagtgtccccctgagttctcctctgaaggtgagcctgggggtgggtggagaaggggaggtgcgagggtctggccagcaggggtactggggcatgtatgcttggggaactgtgaagaatttcagaatcctggattcccagagaatagtacaggacatgtagattcagacactctttcacaggttcatggaatctcaggatcataagattgaaaggaatctctgatgtcagcgccagcaacttcctggtgagggcaggagtgacggataccttgcacctggcagaagcgtcctggccttctctgggcctggtggccaactgctcattattgtctgacagctctggttggccaatttggttttgttgttaattataaaattgatataccaattagccagtaatatatagtcactttagaaaacacaagtggtcaaaaaataaataaaataggccaggtgtggtggctcatgcctgtaatcccaacactttgggaggctgaggtgggtggatcttttgaggtcaggagtttgagaccagcctggccaacatagtgaaaccccatctctactaaaagtacaaaaattagctgggcgtggtggcatgtgcctgtaatcctagctactcaggaggctgaggtaggagaattgctggaacccaagaggcagaggttgcagaaagccaggatcgcaccactgcactccagcctgggtgacagagtgaaactctgtcccaaaataaataaataaataaaataaatcacttgaaatctcactacctagtgataagggataagcacttttaacatcttataggatattctttgcaactttcccccatacaattacatacataacacacatatttatttttaatggatatgtatgataataggcagtgctcattgtaaatgtcctccagtaatctaaatcctagagatagtcagtgtttgctctttatatatcccatcagaatttttatgtgtttgtaaatatatacacacttatactcatgggattatatgatatgtgctattatacttgctattttttttgcctcatactatatgtccatatctttccaaggattaggtggctctacttattcaatttttttttatccaatcattattttattattttaatgtattgtaattttagagacagtgtgtcactctgttgctcaggctggagtgcagtagtgtgatcatggcttactgcagccttgacctcctgggcttaagggatcctcccacctcagcctcctgagtagctgggaccacaggttcatgtcaccatgcttacctaatttttttattttttatggagacggagcctccctgtgttgcccaggctggtctcaaactcctgagttcaagcaatcctcctgcctcagactctcaaaatgttgggattataggcgtgagccaccttgctcagcccacccaatcatttttaatggcagaaatattctgatgtggatctttcataatttatataacaagtctattgttgaacatttagtttgtttccagggtagtttttatttgtttgtttgtttatttgtttgttttgagacaggttcttactctgttgcctaggctggagtgcagtagcgcaatctcagctccctgcaacctccacttcccgggttcaagcgattctcctgtctcagcctcccaaagtgctgggattacaggcacctgccattgcgccccactaatttttgtatttttagtagagatggggtttcaccatgttggccaggctggtcttgaactcctgacctcaggcaatgtgcctgcctcggcctcccaaagtgctgggattacagacacctgccaccatgcccagctactttttgtatttttagtagagatggggtttcaccatgttatccaggctggtcttgaactcctgacctcaggcaatccacctgcctcagcctcccaaagtgctgggattataggcttgagccactgtacctggccagagggttttttttgtttgtttgttttttgttttgctgtagtaaccacctttgtagaaattattcttatagtacatctttttataattttctgattctctagatacacactttttaggtcttttgatacattttgccaaagtgcctcccaatgtttgaataaacctgcatcattcctagtgagcgtagatgtctattcataagtttatttgccttttgtatttactttgggaataacctgtttgtttccatccattgactattttaggggtgtatgtttttatattttcttagaaaacaatgaagacttttcatatatccattgcaacaccatttaatatggtcctttcctctctagctaaaattgctacctttatatgatgctcctctatgcccttcagtctgttcctgatccagatctattctagtaccagttttgtgttaattatttagaagattcctgatttggattctgtgtttctatcattatccttagacctgtcttaatcacagctcctacgttatgggctttccttgagcaatacctgagttagaaaatcatgtggaaagtgctttgcacagggcctggcacccaggacatgctcagtacattttatatcttgtgaacatttcgattagtatctgtcttatcctgcagtctcttgacccagacacaagtcctggatatgtggcagctttcagctcccctgcacctcctaccaagccttttcctagcagagtcattgtgtttccattactgttcctcaagtgatagggggtcaagccctgtacccttggatctgggccaagggatggaatcattccctatgtatggacactggactgtttctctgccagggtcacacacatttatttgtgtgctccctctgctgatctggagtgtgggctctcctggtaggccgtccgccatgctccctctgctgccatcaccatgcagccactggtgtttccagggagggggctatgcagctgacttggaaacaagaagctggcaaacccgctcttctgccctcagcctgcttttcctggcttcttcacaaaccattaagatgggttttactccctattctccttttccattgctttattacctttcataaatttgggcctacataatctcctctgtctttactgtcacttgtgcttaggaaaaattagcctcagatcccctctgctccttctttttccccaatttctttttttttttttttttttttgagatggagtttcactctgttgcctagactggagtgtagtcgcgcgatcatggctcattgcaacctctgcctcccggtttcaagggattctcctgcgtcagcctccagagtagctgggattataggcgtgcacttttttagtagagatggggttttgtcacattggccaggctggtctcaaactcctgacctcaggtgatctgcccaccttggcctcccaaagtgctgggattacaggcgtgagccaccaggcccggctcccaatatttctcgtatatatatatatatttatttatttatttggttcagttcttttttcaggatatgtgcatatcaactattagatgaaagctcttctgaccacttgctagggagaagagccgatgagggacaaagggtctcaggaaaggttgcaacttgacccaggtcacaaagctagttgttagcatggacaaggctggtatgtttatcttggggtttggttcctgagcttttactggcagggaggtagacttggtgcttggtgtatttgcaggggaggggagaggagtgctgcagattcagttccagaactctccccttgcccagcagacctgcttatgagagctgcccagaactaagctctggatgagcctggagcactcttggggtccatggggcttcaaccccttgttacactgaggcccagaggagagtgactgcccaaacccaagaaagcaactgccatcctctctttctctgatcttgctgtagtgaaatttctttaatcaaaagtcaaatctgggacctggctggatttgactccagctgcaatttttaaaagttaaatgtcccggattccatggccgtgggtaagactggggcctgctcaggagctcccttttctcttttgacttgctccatgggatctggcatagttaataactcccaatgcccagccctccctcaagttccagcctgtgggaccctggttttcccatcctcaagaactgtaaattgtcactgtatttgtcatatgtacttattccagcctttcaggcctggtaacttggctcccccagcacccaaagtcatatacatgcctgggctcattactccaccctgcttccttttctgagtcatagtagcaaatagattgagaataagaaatgagccatcatttgtaatttccaaatggtaggtgtggctgctgccttagaaccctctgttgacttcagttcagtacacttcttgtgtcgtgctggtcctgtgctgggggcaggagtagagatgagggagccactacctcttctggtagatgcagccctacaggttccagcctggtgggaggagccctggcaggacttgtccccctactggcctcctccactgtgtgttctcactcagggcataactggctcaaacattttcattagggtattggcgacacaaggagagagtattggctaaggaaaaaggcagggcagaagtcatggaggaggaagcttttgatttcaggcactgtgcaaagtgctggtatttccctctcaatgggacctgtgagagaggtaggcactctaaaatatcccacttttgaagatgaggcgaggctggatacagtgcttcatgcctgtaatcccaggaccttgggaggccgaggcgggtggatcatttgaagtcaggagtttgagaccagcctgaccaacatggtgaaaccccatctctactaaaaatacaaaaacattagccaggcgtggtagctcatgcctgtaatctcagctactcaggaggctaagacaggagaatcgcttgaacgcaggaagcagagtttgtagtgagccaaaatcacaccactatactccagcctaggtgacagagtgagactctgtctcaaaaaaaaaaaaagaaggtgagggaatggccactgagagagattaagtaactcacccaagggcacaataaaactaggaagtggcagaactagcattccaacctaggccctctgacttttcctaggcagcggggtagaagcaggtttgatgagagagaggagggctgagagggtgctgtgtggccagtggtggagataatgggtatgtcttaggagcagatgaggccagtgagaggagcaattagaatttgtccactcagaccacaggatgtgctaacttctttgttctttctgggcctggaggaaggcagctaatatctcgacatctggggcatctggaagacttgagtccgtggcctgggaaccagcctgagcccagcagcctcttaggacataagtgcccatccaggatttaatctcttagaaacagagccccaaataaagtgagcctagaggctgggattcctagaatgctagaatgtcagagctgaaagggatcctaaaaatgtgatttcctgccataacacgcacaaggaatcagatatttgagaaagctaatttcctggtgctctttcctgagagttttcccttgatacctttggtgggtgatggacatggttctaaagccaactcatttggcactagaggcaactaacacatggtgactgttcagcgcgtgcccggcacaactgggatgtccaccatgaaatttgggccacttcctcctggtcagcttcagcctccaaaacgggagcaaagtcatgacagtatggaggtgtgaagtgtgttctagagcttctcacccagccctactccaggcacaagagtcttttgtagctttcccggctgagtcagggagcccgtactccttgaggcagctccatctgttgtaacctagctatgattttataccagtctcaaggtgatctttctatacattcctattgttcttaattctgtcttctgtggctgtacggagaaaatgtgacccaagagcagccagttgggttcattttggtaaccagctcatcagttggtagtaactacctgaagtcctatgcagaaaaggattttggggccacgactgggctcagaaggaaagcccaggaaacaatgccacagttaaccaattagcagttagatgacaagtgcatttcaatgcaagtgttagagccaatcaatgggtagtgactacctaaagaattctaagactatggactgagcatgatggctcacgcctgtaatcccagcactttgggaggtggaggtggaaggattgcttgaggccaggagttccagaccagcctgggcaacaaagtgagaccccatctctacaaaaaatacaaaattagctgggtgtggtggcatgtgcctgtctgtgtttcccacctacatgggaggctgaggcaggaggatcgtctgagcccaggagtttgaggctgcagtgagtgcagtgagccatgatacaaaaaaaaaaaaaaagaattctaagtctatgtatagttcagtgtagggggaaaattcacatttgattattaatgtctgccatgggcacaataatacactatactcacacatgggccacaatgttgccattcctagaacagactatctctaagatctcatccagttaaaaattctatgattaaaatatattgctgcttttttgaagacagaagagctggtatgtttgccctggaatttacacttataacctttttcaaacctttgttttatttttttttaccaggtggatttagttttggagaaggaggtggctggcctctggatcaagatcccatgcacagactacattggcagctgtacctttgaacacttctgtgatgtgcttgacatgttaattcctactggggagccctgcccagagcccctgcgtacctatgggcttccttgccactgtcccttcaaagaagtaagtacttagggaggagagagcgttacccctgtggctaaagagatggggtttggagagaagggtctttgcattctccttctgcagatctgcatgtctctggatttgtaagccagtgtgacctatcaggaatcacttatcttccgggagcctcagttatccatctacgaaatgggagacttgaacttagatgtgatcttcagggccctttatccataataatccatgctctacagtgctatggccgtctctcatcttgtgcggctgttttgagaatgggaagaggggtggtagttcatggctgcaatcctagcagtggctctaggagaaagaccccatcagtaggctcccactgactggcggtccactggctttcccgcagggaacctactcactgcccaagagcgaattcgttgtgcctgacctggagctgcccagttggctcaccaccgggaactaccgcatagagagcgtcctgagcagcagtgggaagcgtctgggctgcatcaagatcgctgcctctctaaagggcatataacatggcatctgccacagcagaatggagcggtgtgaggaaggtcccttttcctctgttttgtgtttgccaaggccaaactcccactctctgcccccctttaatcccctttctacagtgagtccactaccctcactgaaaatcattttgtaccacttacattttaggctggggcaagcagccctgacctaagggagaatgagttggacagttcttgatagcccagggcatctgctgggctgaccacgttactcatccccgttaacattctctctaaagagcctcgttcatttccaaagcagttaaggaatgggaaccagagtgttttaggacctgaagaatctttatgactctctctctttcactcttttttttttttgtcactaagttaaaagcgaagtgagagtattaacgtttttgttctcctccggccccctgttacaatgaaggggcaaaagtatttgctcttagtctattcctcccttaacttctgtgactaatttttatttcctttctagatttgcccaattaatactagggtgcagtgtatcctggagaggtagggtgtgtgggggaggaatcccttgggggagatattaggagtgctctgttgtttacaaactcaggtacccgcagggcctagcaagagacttaaatgactgataagaaccgtgagaaacatgttgcttccaggcttgatttcgatttttcgctttttttttttttgagacagaatctcactttgtcaccaggctggagtgcagtggtgcaatctcacctcactgcaacctccgcctcctgggttcaagcaattctcctgcctcagcctcccaagtagcttggactacaggccctgccaccacgcccggctaatttgtgtatttttagtagagatggggtttcaccatgttggccaggatggtctcgatctcttgacctcgtgatctgtccaccttggccttgcaaagcgctggattacaggcatgagccactacacccagccgatttttcctttttgattaaagatgctattacaatgtaaatatttcttacacagaaagtcacagcacatgtgcccattgatacaaggctgctgaggcctggtctccagttggaaatataattaagggtggcaaggactggagtcagttggagagtgcatagccagtctgtgaagacaactgccagatactggcaatactccagcctggtgacagagtgagactctgtctcaaaaaaaaagtttcaatgtttactcctagagaagccaaaaatccagatttgtatatgaaatcttaccattttaaaagattggcagctaattatttttttaaaaagctgtgcagtgtgatgtgtcccaaacggactggctcatgggtggccacgtcacaacctctgatctcagaccgtgcatgccttgtcctcttaagacaactcctgtggcaccgtttctccctccacagggccaaagccatagtgtccggtcccaaggacaaggctcttccagtgctaggagaggtatgagcagcctctcacctgtgagctgtggggatcacaaggctgcctgcctcagtcttggagtcctgttgggtgaatgaggcagatgggaaagagcctcaccagcagctgcttttggagcaggggtccaaggaagagagggtggcctcgacatcaaactgcctggatttttctaccaccctgttacatcataacaacttctgaaacacacaccagccctgagttctgggctcatttgaagcctggaatagcaataaatctttttaacttgcggacagtttccccttgccttggctgcatatttcactgatcacatctcaggatttcaaaagcatttttggggtggggctcttttggttggaagggtttgttggaacggtacaggtgagccgaggtgattccagggacggacccttctgcaggagcttgagcttgcttgttgtctctgcttcatcgccatccagctcccttgtttgctattttgctttccatcacatcatgactgcggagagcaaaaatcacctagtgaccattgaacaggtcccagagacaaaatctttttatctgaggaatttaaaagggagcaaagaccacctggtgactatcaggccatgcagaggcaaaacgccttatttggggaaaattaaaagtaattagactttcctattatctaaagcaggcatctggttccagatttcttttccccgaaaaaaaccttagaagtaactaaaatttctgtacatctccggaatgccatgctgaaactcactgcaaccccacggtcccgctttaaggtccataaatatccctaaggaaaaatccaccgtggtacattcagtcctctcaccgaggtgccccatggcagtcttctgcagcattcttctaatacctttcctttttcaaacctatactgttgttggtgaattctttttaccaacccacgagttgaccacttcccaatgccggggatctgacacctcacctggcaatgacctccacagccgtttccctctgttggatcttccagccttattctcaacagttcatttttagttcacattcttgaccgaatctcagtagctcagttaatctttttatgtctgctctgctcttgggtcatatgttccgtgaggtttcttaggggtgggggatgaggagttaaaggtggcatcttcaatcgcaggtcaaagcagactttaataaatggtgctgagccaactggaaagccccttggagaaagttgaagttagacctgtacttcacaccatatgcaagaatgaactccatctggatccaggatccaaatgtaagaaaatgaagccatataaatacagaaggaaacgtggtggaaatatccagtggcaacaaaatattgacacatttgactacatgaagataataaaaatgcttagtaaaaacacaataaaatcaaatgactgggagaaaaatttatccagcctatataatagacaaa

SEQ ID NO: 25 - protein, 255 aa, Homo sapiens
MQPLLLLLAFLLPTGAEAGEIIGGRESRPHSRPYMAYLQIQSPAGQSRCGGFLVREDFVLTAAHCWGSNINVTLGAHNIQRRENTQQHITARRAIRHPQYNQRTIQNDIMLLQLSRRVRRNRNVNPVALPRAQEGLRPGTLCTVAGWGRVSMRRGTDTLREVQLRVQRDRQCLRIFGSYDPRRQICVGDRRERKAAFKGDSGGPLLCNNVAHGIVSYGKSSGVPPEVFTRVSSFLPWIRTTMRSFKLLDQMETPL

SEQ ID NO: 26 - protein, 251 aa, Homo sapiens
MTRLTVLALLAGLLASSRAGSSPLLDIVGGRKARPRQFPFLASIQNQGRHFCGGALIHARFVMTAASCFQSQNPGVSTVVLGAYDLRRRERQSRQTFSISSMSENGYDPQQNLNDLMLLQLDREANLTSSVTILPLPLQNATVEAGTRCQVAGWGSQRSGGRLSRFPRFVNVTVTPEDQCRPNNVCTGVLTRRGGICNGDGGTPLVCEGLAHGVASFSLGPCGRGPDFFTRVALFRDWIDGVLNNPGPGPA

SEQ ID NO: 27 - protein, 798 aa, Homo sapiens
MNLQPIFWIGLISSVCCVFAQTDENRCLKANAKSCGECIQAGPNCGWCTNSTFLQEGMPTSARCDDLEALKKKGCPPDDIENPRGSKDIKKNKNVTNRSKGTAEKLKPEDITQIQPQQLVLRLRSGEPQTFTLKFKRAEDYPIDLYYLMDLSYSMKDDLENVKSLGTDLMNEMRRITSDFRIGFGSFVEKTVMPYISTTPAKLRNPCTSEQNCTSPFSYKNVLSLTNKGEVFNELVGKQRISGNLDSPEGGFDAIMQVAVCGSLIGWRNVTRLLVFSTDAGFHFAGDGKLGGIVLPNDGQCHLENNMYTMSHYYDYPSIAHLVQKLSENNIQTIFAVTEEFQPVYKELKNLIPKSAVGTLSANSSNVIQLIIDAYNSLSSEVILENGKLSEGVTISYKSYCKNGVNGTGENGRKCSNISIGDEVQFEISITSNKCPKKDSDSFKIRPLGFTEEVEVILQYICECECQSEGIPESPKCHEGNGTFECGACRCNEGRVGRHCECSTDEVNSEDMDAYCRKENSSEICSNNGECVCGQCVCRKRDNTNEIYSGKFCECDNFNCDRSNGLICGGNGVCKCRVCECNPNYTGSACDCSLDTSTCEASNGQICNGRGICECGVCKCTDPKFQGQTCEMCQTCLGVCAEHKECVQCRAFNKGEKKDTCTQECSYFNITKVESRDKLPQPVQPDPVSHCKEKDVDDCWFYFTYSVNGNNEVMVHVVENPECPTGPDIIPIVAGVVAGIVLIGLALLLIWKLLMIIHDRREFAKFEKEKMNAKWDTGENPIYKSAVTTVVNPKYEGK

SEQ ID NO: 28 - protein, 789 aa, Homo sapiens
MNLQPIFWIGLISSVCCVFAQTDENRCLKANAKSCGECIQAGPNCGWCTNSTFLQEGMPTSARCDDLEALKKKGCPPDDIENPRGSKDIKKNKNVTNRSKGTAEKLKPEDITQIQPQQLVLRLRSGEPQTFTLKFKRAEDYPIDLYYLMDLSYSMKDDLENVKSLGTDLMNEMRRITSDFRIGFGSFVEKTVMPYISTTPAKLRNPCTSEQNCTSPFSYKNVLSLTNKGEVFNELVGKQRISGNLDSPEGGFDAIMQVAVCGSLIGWRNVTRLLVFSTDAGFHFAGDGKLGGIVLPNDGQCHLENNMYTMSHYYDYPSIAHLVQKLSENNIQTIFAVTEEFQPVYKELKNLIPKSAVGTLSANSSNVIQLIIDAYNSLSSEVILENGKLSEGVTISYKSYCKNGVNGTGENGRKCSNISIGDEVQFEISITSNKCPKKDSDSFKIRPLGFTEEVEVILQYICECECQSEGIPESPKCHEGNGTFECGACRCNEGRVGRHCECSTDEVNSEDMDAYCRKENSSEICSNNGECVCGQCVCRKRDNTNEIYSGKFCECDNFNCDRSNGLICGGNGVCKCRVCECNPNYTGSACDCSLDTSTCEASNGQICNGRGICECGVCKCTDPKFQGQTCEMCQTCLGVCAEHKECVQCRAFNKGEKKDTCTQECSYFNITKVESRDKLPQPVQPDPVSHCKEKDVDDCWFYFTYSVNGNNEVMVHVVENPECPTGPDIIPIVAGVVAGIVLIGLALLLIWKLLMIIHDRREFAKFEKEKMNAKWDTVSYKTSKKQSGL

SEQ ID NO: 29 - protein, 825 aa, Homo sapiens
MNLQPIFWIGLISSVCCVFAQTDENRCLKANAKSCGECIQAGPNCGWCTNSTFLQEGMPTSARCDDLEALKKKGCPPDDIENPRGSKDIKKNKNVTNRSKGTAEKLKPEDITQIQPQQLVLRLRSGEPQTFTLKFKRAEDYPIDLYYLMDLSYSMKDDLENVKSLGTDLMNEMRRITSDFRIGFGSFVEKTVMPYISTTPAKLRNPCTSEQNCTSPFSYKNVLSLTNKGEVFNELVGKQRISGNLDSPEGGFDAIMQVAVCGSLIGWRNVTRLLVFSTDAGFHFAGDGKLGGIVLPNDGQCHLENNMYTMSHYYDYPSIAHLVQKLSENNIQTIFAVTEEFQPVYKELKNLIPKSAVGTLSANSSNVIQLIIDAYNSLSSEVILENGKLSEGVTISYKSYCKNGVNGTGENGRKCSNISIGDEVQFEISITSNKCPKKDSDSFKIRPLGFTEEVEVILQYICECECQSEGIPESPKCHEGNGTFECGACRCNEGRVGRHCECSTDEVNSEDMDAYCRKENSSEICSNNGECVCGQCVCRKRDNTNEIYSGKFCECDNFNCDRSNGLICGGNGVCKCRVCECNPNYTGSACDCSLDTSTCEASNGQICNGRGICECGVCKCTDPKFQGQTCEMCQTCLGVCAEHKECVQCRAFNKGEKKDTCTQECSYFNITKVESRDKLPQPVQPDPVSHCKEKDVDDCWFYFTYSVNGNNEVMVHVVENPECPTGPDIIPIVAGVVAGIVLIGLALLLIWKLLMIIHDRREFAKFEKEKMNAKWDTSLSVAQPGVQWCDISSLQPLTSRFQQFSCLSLPSTWDYRVKILFIRVP

SEQ ID NO: 30 - protein, 819 aa, Homo sapiens
MNLQPIFWIGLISSVCCVFAQTDENRCLKANAKSCGECIQAGPNCGWCTNSTFLQEGMPTSARCDDLEALKKKGCPPDDIENPRGSKDIKKNKNVTNRSKGTAEKLKPEDITQIQPQQLVLRLRSGEPQTFTLKFKRAEDYPIDLYYLMDLSYSMKDDLENVKSLGTDLMNEMRRITSDFRIGFGSFVEKTVMPYISTTPAKLRNPCTSEQNCTSPFSYKNVLSLTNKGEVFNELVGKQRISGNLDSPEGGFDAIMQVAVCGSLIGWRNVTRLLVFSTDAGFHFAGDGKLGGIVLPNDGQCHLENNMYTMSHYYDYPSIAHLVQKLSENNIQTIFAVTEEFQPVYKELKNLIPKSAVGTLSANSSNVIQLIIDAYNSLSSEVILENGKLSEGVTISYKSYCKNGVNGTGENGRKCSNISIGDEVQFEISITSNKCPKKDSDSFKIRPLGFTEEVEVILQYICECECQSEGIPESPKCHEGNGTFECGACRCNEGRVGRHCECSTDEVNSEDMDAYCRKENSSEICSNNGECVCGQCVCRKRDNTNEIYSGKFCECDNFNCDRSNGLICGGNGVCKCRVCECNPNYTGSACDCSLDTSTCEASNGQICNGRGICECGVCKCTDPKFQGQTCEMCQTCLGVCAEHKECVQCRAFNKGEKKDTCTQECSYFNITKVESRDKLPQPVQPDPVSHCKEKDVDDCWFYFTYSVNGNNEVMVHVVENPECPTGPDIIPIVAGVVAGIVLIGLALLLIWKLLMIIHDRREFAKFEKEKMNAKWDTPGVQWCDISSLQPLTSRFQQFSCLSLPSTWDYRVKILFIRVP

SEQ ID NO: 31 - protein, 801 aa, Homo sapiens
MNLQPIFWIGLISSVCCVFAQTDENRCLKANAKSCGECIQAGPNCGWCTNSTFLQEGMPTSARCDDLEALKKKGCPPDDIENPRGSKDIKKNKNVTNRSKGTAEKLKPEDITQIQPQQLVLRLRSGEPQTFTLKFKRAEDYPIDLYYLMDLSYSMKDDLENVKSLGTDLMNEMRRITSDFRIGFGSFVEKTVMPYISTTPAKLRNPCTSEQNCTSPFSYKNVLSLTNKGEVFNELVGKQRISGNLDSPEGGFDAIMQVAVCGSLIGWRNVTRLLVFSTDAGFHFAGDGKLGGIVLPNDGQCHLENNMYTMSHYYDYPSIAHLVQKLSENNIQTIFAVTEEFQPVYKELKNLIPKSAVGTLSANSSNVIQLIIDAYNSLSSEVILENGKLSEGVTISYKSYCKNGVNGTGENGRKCSNISIGDEVQFEISITSNKCPKKDSDSFKIRPLGFTEEVEVILQYICECECQSEGIPESPKCHEGNGTFECGACRCNEGRVGRHCECSTDEVNSEDMDAYCRKENSSEICSNNGECVCGQCVCRKRDNTNEIYSGKFCECDNFNCDRSNGLICGGNGVCKCRVCECNPNYTGSACDCSLDTSTCEASNGQICNGRGICECGVCKCTDPKFQGQTCEMCQTCLGVCAEHKECVQCRAFNKGEKKDTCTQECSYFNITKVESRDKLPQPVQPDPVSHCKEKDVDDCWFYFTYSVNGNNEVMVHVVENPECPTGPDIIPIVAGVVAGIVLIGLALLLIWKLLMIIHDRREFAKFEKEKMNAKWDTQENPIYKSPINNFKNPNYGRKAGL

SEQ ID NO: 32 - protein, 570 aa, Homo sapiens
MGNWAVNEGLSIFVILVWLGLNVFLFVWYYRVYDIPPKFFYTRKLLGSALALARAPAACLNFNCMLILLPVCRNLLSFLRGSSACCSTRVRRQLDRNLTFHKMVAWMIALHSAIHTIAHLFNVEWCVNARVNNSDPYSVALSELGDRQNESYLNFARKRIKNPEGGLYLAVTLLAGITGVVITLCLILIITSSTKTIRRSYFEVFWYTHHLFVIFFIGLAIHGAERIVRGQTAESLAVHNITVCEQKISEWGKIKECPIPQFAGNPPMTWKWIVGPMFLYLCERLVRFWRSQQKVVITKVVTHPFKTIELQMKKKGFKMEVGQYIFVKCPKVSKLEWHPFTLTSAPEEDFFSIHIRIVGDWTEGLFNACGCDKQEFQDAWKLPKIAVDGPFGTASEDVFSYEVVMLVGAGIGVTPFASILKSVWYKYCNNATNLKLKKIYFYWLCRDTHAFEWFADLLQLLESQMQERNNAGFLSYNIYLTGWDESQANHFAVHHDEEKDVITGLKQKTLYGRPNWDNEFKTIASQHPNTRIGVFLCGPEALAETLSKQSISNSESGPRGVHFIFNKENF

SEQ ID NO: 33 - protein, 635 aa, Homo sapiens
MASSGMADSANHLPFFFGNITREEAEDYLVQGGMSDGLYLLRQSRNYLGGFALSVAHGRKAHHYTIERELNGTYAIAGGRTHASPADLCHYHSQESDGLVCLLKKPFNRPQGVQPKTGPFEDLKENLIREYVKQTWNLQGQALEQAIISQKPQLEKLIATTAHEKMPWFHGKISREESEQIVLIGSKTNGKFLIRARDNNGSYALCLLHEGKVLHYRIDKDKTGKLSIPEGKKFDTLWQLVEHYSYKADGLLRVLTVPCQKIGTQGNVNFGGRPQLPGSHPATWSAGGIISRIKSYSFPKPGHRKSSPAQGNRQESTVSFNPYEPELAPWAADKGPQREALPMDTEVYESPYADPEEIRPKEVYLDRKLLTLEDKELGSGNFGTVKKGYYQMKKVVKTVAVKILKNEANDPALKDELLAEANVMQQLDNPYIVRMIGICEAESWMLVMEMAELGPLNKYLQQNRHVKDKNIIELVHQVSMGMKYLEESNFVHRDLAARNVLLVTQHYAKISDFGLSKALRADENYYKAQTHGKWPVKWYAPECINYYKFSSKSDVWSFGVLMWEAFSYGQKPYRGMKGSEVTAMLEKGERMGCPAGCPREMYDLMNLCWTYDVENRPGFAAVELRLRNYYYDVVN

SEQ ID NO: 34 - protein, 612 aa, Homo sapiens
MASSGMADSANHLPFFFGNITREEAEDYLVQGGMSDGLYLLRQSRNYLGGFALSVAHGRKAHHYTIERELNGTYAIAGGRTHASPADLCHYHSQESDGLVCLLKKPFNRPQGVQPKTGPFEDLKENLIREYVKQTWNLQGQALEQAIISQKPQLEKLIATTAHEKMPWFHGKISREESEQIVLIGSKTNGKFLIRARDNNGSYALCLLHEGKVLHYRIDKDKTGKLSIPEGKKFDTLWQLVEHYSYKADGLLRVLTVPCQKIGTQGNVNFGGRPQLPGSHPASSPAQGNRQESTVSFNPYEPELAPWAADKGPQREALPMDTEVYESPYADPEEIRPKEVYLDRKLLTLEDKELGSGNFGTVKKGYYQMKKVVKTVAVKILKNEANDPALKDELLAEANVMQQLDNPYIVRMIGICEAESWMLVMEMAELGPLNKYLQQNRHVKDKNIIELVHQVSMGMKYLEESNFVHRDLAARNVLLVTQHYAKISDFGLSKALRADENYYKAQTHGKWPVKWYAPECINYYKFSSKSDVWSFGVLMWEAFSYGQKPYRGMKGSEVTAMLEKGERMGCPAGCPREMYDLMNLCWTYDVENRPGFAAVELRLRNYYYDVVN

SEQ ID NO: 35 - protein, 2099 aa, Homo sapiens
MATLPSAERRAFALKINRYSSAEIRKQFTLPPNLGQYHRQSISTSGFPSLQLPQFYDPVEPVDFEGLLMTHLNSLDVQLAQELGDFTDDDLDVVFTPKECRTLQPSLPEEGVELDPHVRDCVQTYIREWLIVNRKNQGSPEICGFKKTGSRKDFHKTLPKQTFESETLECSEPAAQAGPRHLNVLCDVSGKGPVTACDFDLRSLQPDKRLENLLQQVSAEDFEKQNEEARRTNRQAELFALYPSVDEEDAVEIRPVPECPKEHLGNRILVKLLTLKFEIEIEPLFASIALYDVKERKKISENFHCDLNSDQFKGFLRAHTPSVAASSQARSAVFSVTYPSSDIYLVVKIEKVLQQGEIGDCAEPYTVIKESDGGKSKEKIEKLKLQAESFCQRLGKYRMPFAWAPISLSSFFNVSTLEREVTDVDSVVGRSSVGERRTLAQSRRLSERALSLEENGVGSNFKTSTLSVSSFFKQEGDRLSDEDLFKFLADYKRSSSLQRRVKSIPGLLRLEISTAPEIINCCLTPEMLPVKPFPENRTRPHKEILEFPTREVYVPHTVYRNLLYVYPQRLNFVNKLASARNITIKIQFMCGEDASNAMPVIFGKSSGPEFLQEVYTAVTYHNKSPDFYEEVKIKLPAKLTVNHHLLFTFYHISCQQKQGASVETLLGYSWLPILLNERLQTGSYCLPVALEKLPPNYSMHSAEKVPLQNPPIKWAEGHKGVFNIEVQAVSSVHTQDNHLEKFFTLCHSLESQVTFPIRVLDQKISEMALEHELKLSIICLNSSRLEPLVLFLHLVLDKLFQLSVQPMVIAGQTANFSQFAFESVVAIANSLHNSKDLSKDQHGRNCLLASYVHYVFRLPEVQRDVPKSGAPTALLDPRSYHTYGRTSAAAVSSKLLQARVMSSSNPDLAGTHSAADEEVKNIMSSKIADRNCSRMSYYCSGSSDAPSSPAAPRPASKKHFHEELALQMVVSTGMVRETVFKYAWFFFELLVKSMAQHVHNMDKRDSFRRTRFSDRFMDDITTIVNVVTSEIAALLVKPQKENEQAEKMNISLAFFLYDLLSLMDRGFVFNLIRHYCSQLSAKLSNLPTLISMRLEFLRILCSHEHYLNLNLFFMNADTAPTSPCPSISSQNSSSCSSFQDQKIASMFDLTSEYRQQHFLTGLLFTELAAALDAEGEGISKVQRKAVSAIHSLLSSHDLDPRCVKPEVKVKIAALYLPLVGIILDALPQLCDFTVADTRRYRTSGSDEEQEGAGAINQNVALAIAGNNFNLKTSGIVLSSLPYKQYNMLNADTTRNLMICFLWIMKNADQSLIRKWIADLPSTQLNRILDLLFICVLCFEYKGKQSSDKVSTQVLQKSRDVKARLEEALLRGEGARGEMMRRRAPGNDRFPGLNENLRWKKEQTHWRQANEKLDKTKAELDQEALISGNLATEAHLIILDMQENIIQASSALDCKDSLLGGVLRVLVNSLNCDQSTTYLTHCFATLRALIAKFGDLLFEEEVEQCFDLCHQVLHHCSSSMDVTRSQACATLYLLMRFSFGATSNFARVKMQVTMSLASLVGRAPDFNEEHLRRSLRTILAYSEEDTAMQMTPFPTQVEELLCNLNSILYDTVKMREFQEDPEMLMDLMYRIAKSYQASPDLRLTWLQNMAEKHTKKKCYTEAAMCLVHAAALVAEYLSMLEDHSYLPVGSVSFQNISSNVLEESVVSEDTLSPDEDGVCAGQYFTESGLVGLLEQAAELFSTGGLYETVNEVYKLVIPILEAHREFRKLTLTHSKLQRAFDSIVNKDHKRMFGTYFRVGFFGSKFGDLDEQEFVYKEPAITKLPEISHRLEAFYGQCFGAEFVEVIKDSTPVDKTKLDPNKAYIQITFVEPYFDEYEMKDRVTYFEKNFNLRRFMYTTPFTLEGRPRGELHEQYRRNTVLTTMHAFPYIKTRISVIQKEEFVLTPIEVAIEDMKKKTLQLAVAINQEPPDAKMLQMVLQGSVGATVNQGPLEVAQVFLAEIPADPKLYRHHNKLRLCFKEFIMRCGEAVEKNKRLITADQREYQQELKKNYNKLKENLRPMIERKIPELYKPIFRVESQKRDSFHRSSFRKCETQLSQGS

SEQ ID NO: 36 - protein, 2067 aa, Homo sapiens
MATLPSAERRAFALKINRYSSAEIRKQFTLPPNLGQYHRQSISTSGFPSLQLPQFYDPVEPVDFEGLLMTHLNSLDVQLAQELGDFTDDDLDVVFTPKECRTLQPSLPEEGVELDPHVRDCVQTYIREWLIVNRKNQGSPEICGFKKTGSRKDFHKTLPKQTFESETLECSEPAAQAGPRHLNVLCDVSGKGPVTACDFDLRSLQPDKRLENLLQQVSAEDFEKQNEEARRTNRQAELFALYPSVDEEDAVEIRPVPECPKEHLGNRILVKLLTLKFEIEIEPLFASIALYDVKERKKISENFHCDLNSDQFKGFLRAHTPSVAASSQARSAVFSVTYPSSDIYLVVKIEKVLQQGEIGDCAEPYTVIKESDGGKSKEKIEKLKLQAESFCQRLGKYRMPFAWAPISLSSFFNVSTLEREVTDVDSVVGRSSVGERRTLAQSRRLSERALSLEENGVGSNFKTSTLSVSSFFKQEGDRLSDEDLFKFLADYKRSSSLQRRVKSIPGLLRLEISTAPEIINCCLTPEMLPVKPFPENRTRPHKEILEFPTREVYVPHTVYRNLLYVYPQRLNFVNKLASARNITIKIQFMCGEDASNAMPVIFGKSSGPEFLQEVYTAVTYHNKSPDFYEEVKIKLPAKLTVNHHLLFTFYHISCQQKQGASVETLLGYSWLPILLNERLQTGSYCLPVALEKLPPNYSMHSAEKVPLQNPPIKWAEGHKGVFNIEVQAVSSVHTQDNHLEKFFTLCHSLESQVTFPIRVLDQKISEMALEHELKLSIICLNSSRLEPLVLFLHLVLDKLFQLSVQPMVIAGQTANFSQFAFESVVAIANSLHNSKDLSKDQHGRNCLLASYVHYVFRLPEVQRDVPKSGAPTALLDPRSYHTYGRTSAAAVSSKLLQARVMSSSNPDLAGTHSAADEEVKNIMSSKHFHEELALQMVVSTGMVRETVFKYAWFFFELLVKSMAQHVHNMDKRDSFRRTRFSDRFMDDITTIVNVVTSEIAALLVKPQKENEQAEKMNISLAFFLYDLLSLMDRGFVFNLIRHYCSQLSAKLSNLPTLISMRLEFLRILCSHEHYLNLNLFFMNADTAPTSPCPSISSQNSSSCSSFQDQKIASMFDLTSEYRQQHFLTGLLFTELAAALDAEGEGISKVQRKAVSAIHSLLSSHDLDPRCVKPEVKVKIAALYLPLVGIILDALPQLCDFTVADTRRYRTSGSDEEQEGAGAINQNVALAIAGNNFNLKTSGIVLSSLPYKQYNMLNADTTRNLMICFLWIMKNADQSLIRKWIADLPSTQLNRILDLLFICVLCFEYKGKQSSDKVSTQVLQKSRDVKARLEEALLRGEGARGEMMRRRAPGNDRFPGLNENLRWKKEQTHWRQANEKLDKTKAELDQEALISGNLATEAHLIILDMQENIIQASSALDCKDSLLGGVLRVLVNSLNCDQSTTYLTHCFATLRALIAKFGDLLFEEEVEQCFDLCHQVLHHCSSSMDVTRSQACATLYLLMRFSFGATSNFARVKMQVTMSLASLVGRAPDFNEEHLRRSLRTILAYSEEDTAMQMTPFPTQVEELLCNLNSILYDTVKMREFQEDPEMLMDLMYRIAKSYQASPDLRLTWLQNMAEKHTKKKCYTEAAMCLVHAAALVAEYLSMLEDHSYLPVGSVSFQNISSNVLEESVVSEDTLSPDEDGVCAGQYFTESGLVGLLEQAAELFSTGGLYETVNEVYKLVIPILEAHREFRKLTLTHSKLQRAFDSIVNKDHKRMFGTYFRVGFFGSKFGDLDEQEFVYKEPAITKLPEISHRLEAFYGQCFGAEFVEVIKDSTPVDKTKLDPNKAYIQITFVEPYFDEYEMKDRVTYFEKNFNLRRFMYTTPFTLEGRPRGELHEQYRRNTVLTTMHAFPYIKTRISVIQKEEFVLTPIEVAIEDMKKKTLQLAVAINQEPPDAKMLQMVLQGSVGATVNQGPLEVAQVFLAEIPADPKLYRHHNKLRLCFKEFIMRCGEAVEKNKRLITADQREYQQELKKNYNKLKENLRPMIERKIPELYKPIFRVESQKRDSFHRSSFRKCETQLSQGS

SEQ ID NO: 37 - protein, 2031 aa, Homo sapiens
MTHLNSLDVQLAQELGDFTDDDLDVVFTPKECRTLQPSLPEEGVELDPHVRDCVQTYIREWLIVNRKNQGSPEICGFKKTGSRKDFHKTLPKQTFESETLECSEPAAQAGPRHLNVLCDVSGKGPVTACDFDLRSLQPDKRLENLLQQVSAEDFEKQNEEARRTNRQAELFALYPSVDEEDAVEIRPVPECPKEHLGNRILVKLLTLKFEIEIEPLFASIALYDVKERKKISENFHCDLNSDQFKGFLRAHTPSVAASSQARSAVFSVTYPSSDIYLVVKIEKVLQQGEIGDCAEPYTVIKESDGGKSKEKIEKLKLQAESFCQRLGKYRMPFAWAPISLSSFFNVSTLEREVTDVDSVVGRSSVGERRTLAQSRRLSERALSLEENGVGSNFKTSTLSVSSFFKQEGDRLSDEDLFKFLADYKRSSSLQRRVKSIPGLLRLEISTAPEIINCCLTPEMLPVKPFPENRTRPHKEILEFPTREVYVPHTVYRNLLYVYPQRLNFVNKLASARNITIKIQFMCGEDASNAMPVIFGKSSGPEFLQEVYTAVTYHNKSPDFYEEVKIKLPAKLTVNHHLLFTFYHISCQQKQGASVETLLGYSWLPILLNERLQTGSYCLPVALEKLPPNYSMHSAEKVPLQNPPIKWAEGHKGVFNIEVQAVSSVHTQDNHLEKFFTLCHSLESQVTFPIRVLDQKISEMALEHELKLSIICLNSSRLEPLVLFLHLVLDKLFQLSVQPMVIAGQTANFSQFAFESVVAIANSLHNSKDLSKDQHGRNCLLASYVHYVFRLPEVQRDVPKSGAPTALLDPRSYHTYGRTSAAAVSSKLLQARVMSSSNPDLAGTHSAADEEVKNIMSSKIADRNCSRMSYYCSGSSDAPSSPAAPRPASKKHFHEELALQMVVSTGMVRETVFKYAWFFFELLVKSMAQHVHNMDKRDSFRRTRFSDRFMDDITTIVNVVTSEIAALLVKPQKENEQAEKMNISLAFFLYDLLSLMDRGFVFNLIRHYCSQLSAKLSNLPTLISMRLEFLRILCSHEHYLNLNLFFMNADTAPTSPCPSISSQNSSSCSSFQDQKIASMFDLTSEYRQQHFLTGLLFTELAAALDAEGEGISKVQRKAVSAIHSLLSSHDLDPRCVKPEVKVKIAALYLPLVGIILDALPQLCDFTVADTRRYRTSGSDEEQEGAGAINQNVALAIAGNNFNLKTSGIVLSSLPYKQYNMLNADTTRNLMICFLWIMKNADQSLIRKWIADLPSTQLNRILDLLFICVLCFEYKGKQSSDKVSTQVLQKSRDVKARLEEALLRGEGARGEMMRRRAPGNDRFPGLNENLRWKKEQTHWRQANEKLDKTKAELDQEALISGNLATEAHLIILDMQENIIQASSALDCKDSLLGGVLRVLVNSLNCDQSTTYLTHCFATLRALIAKFGDLLFEEEVEQCFDLCHQVLHHCSSSMDVTRSQACATLYLLMRFSFGATSNFARVKMQVTMSLASLVGRAPDFNEEHLRRSLRTILAYSEEDTAMQMTPFPTQVEELLCNLNSILYDTVKMREFQEDPEMLMDLMYRIAKSYQASPDLRLTWLQNMAEKHTKKKCYTEAAMCLVHAAALVAEYLSMLEDHSYLPVGSVSFQNISSNVLEESVVSEDTLSPDEDGVCAGQYFTESGLVGLLEQAAELFSTGGLYETVNEVYKLVIPILEAHREFRKLTLTHSKLQRAFDSIVNKDHKRMFGTYFRVGFFGSKFGDLDEQEFVYKEPAITKLPEISHRLEAFYGQCFGAEFVEVIKDSTPVDKTKLDPNKAYIQITFVEPYFDEYEMKDRVTYFEKNFNLRRFMYTTPFTLEGRPRGELHEQYRRNTVLTTMHAFPYIKTRISVIQKEEFVLTPIEVAIEDMKKKTLQLAVAINQEPPDAKMLQMVLQGSVGATVNQGPLEVAQVFLAEIPADPKLYRHHNKLRLCFKEFIMRCGEAVEKNKRLITADQREYQQELKKNYNKLKENLRPMIERKIPELYKPIFRVESQKRDSFHRSSFRKCETQLSQGS

SEQ ID NO: 38 - protein, 2031 aa, Homo sapiens; identical to SEQ ID NO: 37

SEQ ID NO: 39 - protein, 757 aa, Homo sapiens
MVPDTACVLLLTLAALGASGQGQSPLGSDLGPQMLRELQETNAALQDVRELLRQQVREITFLKNTVMECDACGMQQSVRTGLPSVRPLLHCAPGFCFPGVACIQTESGARCGPCPAGFTGNGSHCTDVNECNAHPCFPRVRCINTSPGFRCEACPPGYSGPTHQGVGLAFAKANKQVCTDINECETGQHNCVPNSVCINTRGSFQCGPCQPGFVGDQASGCQRRAQRFCPDGSPSECHEHADCVLERDGSRSCVCAVGWAGNGILCGRDTDLDGFPDEKLRCPERQCRKDNCVTVPNSGQEDVDRDGIGDACDPDADGDGVPNEKDNCPLVRNPDQRNTDEDKWGDACDNCRSQKNDDQKDTDQDGRGDACDDDIDGDRIRNQADNCPRVPNSDQKDSDGDGIGDACDNCPQKSNPDQADVDHDFVGDACDSDQDQDGDGHQDSRDNCPTVPNSAQEDSDHDGQGDACDDDDDNDGVPDSRDNCRLVPNPGQEDADRDGVGDVCQDDFDADKVVDKIDVCPENAEVTLTDFRAFQTVVLDPEGDAQIDPNWVVLNQGREIVQTMNSDPGLAVGYTAFNGVDFEGTFHVNTVTDDDYAGFIFGYQDSSSFYVVMWKQMEQTYWQANPFRAVAEPGIQLKAVKSSTGPGEQLRNALWHTGDTESQVRLLWKDPRNVGWKDKKSYRWFLQHRPQVGYIRVRFYEGPELVADSNVVLDTTMRGGRLGVFCFSQENIIWANLRYRCNDTIPEDYETHQLRQA

SEQ ID NO: 40 - protein, 704 aa, Homo sapiens
MVPDTACVLLLTLAALGASGQGQSPLGSDLGPQMLRELQETNAALQDVRELLRQQVREITFLKNTVMECDACGMQQSVRTGLPSVRPLLHCAPGFCFPGVACIQTESGARCGPCPAGFTGNGSHCTDVNECETGQHNCVPNSVCINTRGSFQCGPCQPGFVGDQASGCQRRAQRFCPDGSPSECHEHADCVLERDGSRSCVCAVGWAGNGILCGRDTDLDGFPDEKLRCPERQCRKDNCVTVPNSGQEDVDRDGIGDACDPDADGDGVPNEKDNCPLVRNPDQRNTDEDKWGDACDNCRSQKNDDQKDTDQDGRGDACDDDIDGDRIRNQADNCPRVPNSDQKDSDGDGIGDACDNCPQKSNPDQADVDHDFVGDACDSDQDQDGDGHQDSRDNCPTVPNSAQEDSDHDGQGDACDDDDDNDGVPDSRDNCRLVPNPGQEDADRDGVGDVCQDDFDADKVVDKIDVCPENAEVTLTDFRAFQTVVLDPEGDAQIDPNWVVLNQGREIVQTMNSDPGLAVGYTAFNGVDFEGTFHVNTVTDDDYAGFIFGYQDSSSFYVVMWKQMEQTYWQANPFRAVAEPGIQLKAVKSSTGPGEQLRNALWHTGDTESQVRLLWKDPRNVGWKDKKSYRWFLQHRPQVGYIRVRFYEGPELVADSNVVLDTTMRGGRLGVFCFSQENIIWANLRYRCNDTIPEDYETHQLRQA

SEQ ID NO: 41 - protein, 703 aa, Homo sapiens
MAAATGDPGLSKLQFAPFSSALDVGFWHELTQKKLNEYRLDEAPKDIKGYYYNGDSAGLPARLTLEFSAFDMSAPTPARCCPAIGTLYNTNTLESFKTADKKLLLEQAANEIWESIKSGTALENPVLLNKFLLLTFADLKKYHFYYWFCYPALCLPESLPLIQGPVGLDQRFSLKQIEALECAYDNLCQTEGVTALPYFLIKYDENMVLVSLLKHYSDFFQGQRTKITIGVYDPCNLAQYPGWPLRNFLVLAAHRWSSSFQSVEVVCFRDRTMQGARDVAHSIIFEVKLPEMAFSPDCPKAVGWEKNQKGGMGPRMVNLSECMDPKRLAESSVDLNLKLMCWRLVPTLDLDKVVSVKCLLLGAGTLGCNVARTLMGWGVRHITFVDNAKISYSNPVRQPLYEFEDCLGGGKPKALAAADRLQKIFPGVNARGFNMSIPMPGHPVNFSSVTLEQARRDVEQLEQLIESHDVVFLLMDTRESRWLPAVIAASKRKLVINAALGFDTFVVMRHGLKKPKQQGAGDLCPNHPVASADLLGSSLFANIPGYKLGCYFCNDVVAPGDSTRDRTLDQQCTVSRPGLAVIAGALAVELMVSVLQHPEGGYAIASSSDDRMNEPPTSLGLVPHQIRGFLSRFDNVLPVSLAFDKCTACSSKVLDQYEREGFNFLAKVFNSSHSFLEDLTGLTLLHQETQAAEIWDMSDDETI

SEQ ID NO: 42 - protein, 676 aa, Homo sapiens
MAAATGDPGLSKLQFAPFSSALDVGFWHELTQKKLNEYRLDEAPKDIKGYYYNGDSAGLPARLTLEFSAFDMSAPTPARCCPAIGTLYNTNTLESFKTADKKLLLEQAANEIWESIKSGTALENPVLLNKFLLLTFADLKKYHFYYWFCYPALCLPESLPLIQGPVGLDQRFSLKQIEALECAYDNLCQTEGVTALPYFLIKYDENMVLVSLLKHYSDFFQGQRTKITIGVYDPCNLAQYPGWPLRNFLVLAAHRWSSSFQSVEVVCFRDRTMQGARDVAHSIIFEVKLPEMAFSPDCPKAVGWEKNQKGGMGPRMVNLSECMDPKRLAESSVDLNLKLMCWRLVPTLDLDKVVSVKCLLLGAGTLGCNVARTLMGWGVRHITFVDNAKISYSNPVRQPLYEFEDCLGGGKPKALAAADRLQKIFPGVNARGFNMSIPMPGHPVNFSSVTLEQARRDVEQLEQLIESHDVVFLLMDTRESRWLPAVIAASKRKLVINAALGFDTFVVMRHGLKKPKQQGAGDLCPNHPVASADLLGSSLFANIPGYKLGCYFCNDVVAPGDSTRDRTLDQQCTVSRPGLAVIAGALAVELMVSVLQHPEGGYAIASSSDDRMNEPPTSLGLVPHQVLDQYEREGFNFLAKVFNSSHSFLEDLTGLTLLHQETQAAEIWDMSDDETI

SEQ ID NO: 43 - protein, 623 aa, Homo sapiens
MAAATGDPGLSKLQFAPFSSALDVGFWHELTQKKLNEYRLDEAPKDIKGYYYNGDSAGLPARLTLEFSAFDMSAPTPARCCPAIGTLYNTNTLESFKTADKKLLLEQAANEIWESIKSGTALENPVLLNKFLLLTFAIEALECAYDNLCQTEGVTALPYFLIKYDENMVLVSLLKHYSDFFQGQRTKITIGVYDPCNLAQYPGWPLRNFLVLAAHRWSSSFQSVEVVCFRDRTMQGARDVAHSIIFEVKLPEMAFSPDCPKAVGWEKNQKGGMGPRMVNLSECMDPKRLAESSVDLNLKLMCWRLVPTLDLDKVVSVKCLLLGAGTLGCNVARTLMGWGVRHITFVDNAKISYSNPVRQPLYEFEDCLGGGKPKALAAADRLQKIFPGVNARGFNMSIPMPGHPVNFSSVTLEQARRDVEQLEQLIESHDVVFLLMDTRESRWLPAVIAASKRKLVINAALGFDTFVVMRHGLKKPKQQGAGDLCPNHPVASADLLGSSLFANIPGYKLGCYFCNDVVAPGDSTRDRTLDQQCTVSRPGLAVIAGALAVELMVSVLQHPEGGYAIASSSDDRMNEPPTSLGLVPHQIRGFLSRFDNVLPVSLAFDKCTACSSKIWDMSDDETI

SEQ ID NO: 44 - protein, 492 aa, Homo sapiens
MEPSSKKLTGRLMLAVGGAVLGSLQFGYNTGVINAPQKVIEEFYNQTWVHRYGESILPTTLTTLWSLSVAIFSVGGMIGSFSVGLFVNRFGRRNSMLMMNLLAFVSAVLMGFSKLGKSFEMLILGRFIIGVYCGLTTGFVPMYVGEVSPTALRGALGTLHQLGIVVGILIAQVFGLDSIMGNKDLWPLLLSIIFIPALLQCIVLPFCPESPRFLLINRNEENRAKSVLKKLRGTADVTHDLQEMKEESRQMMREKKVTILELFRSPAYRQPILIAVVLQLSQQLSGINAVFYYSTSIFEKAGVQQPVYATIGSGIVNTAFTVVSLFVVERAGRRTLHLIGLAGMAGCAILMTIALALLEQLPWMSYLSIVAIFGFVAFFEVGPGPIPWFIVAELFSQGPRPAAIAVAGFSNWTSNFIVGMCFQYVEQLCGPYVFIIFTVLLVLFFIFTYFKVPETKGRTFDEIASGFRQGGASQSDKTPEELFHPLGADSQV

SEQ ID NO: 45 - protein, 264 aa, Homo sapiens
MTKFSSFSLFFLIVGAYMTHVCFNMEIIGGKEVSPHSRPFMASIQYGGHHVCGGVLIDPQWVLTAAHCQYRFTKGQSPTVVLGAHSLSKNEASKQTLEIKKFIPFSRVTSDPQSNDIMLVKLQTAAKLNKHVKMLHIRSKTSLRSGTKCKVTGWGATDPDSLRPSDTLREVTVTVLSRKLCNSQSYYNGDPFITKDMVCAGDAKGQKDSCKGDSGGPLICKGVFHAIVSGGHECGVATKPGIYTLLTKKYQTWIKSNLVPPHTN

SEQ ID NO: 46 - protein, 114 aa, Homo sapiens
MTCKMSQLERNIETIINTFHQYSVKLGHPDTLNQGEFKELVRKDLQNFLKKENKNEKVIEHIMEDLDTNADKQLSFEEFIMLMARLTWASHEKMHEGDEGPGHHHKPGLGEGTP

SEQ ID NO: 47 - protein, 93 aa, Homo sapiens
MLTELEKALNSIIDVYHKYSLIKGNFHAVYRDDLKKLLETECPQYIRKKGADVWFKELDINTDGAVNFQEFLILVIKMGVAAHKKSHEESHKE

SEQ ID NO: 48 - protein, 3056 aa, Homo sapiens
MSLVLNDLLICCRQLEHDRATERKKEVEKFKRLIRDPETIKHLDRHSDSKQGKYLNWDAVFRFLQKYIQKETECLRIAKPNVSASTQASRQKKMQEISSLVKYFIKCANRRAPRLKCQELLNYIMDTVKDSSNGAIYGADCSNILLKDILSVRKYWCEISQQQWLELFSVYFRLYLKPSQDVHRVLVARIIHAVTKGCCSQTDGLNSKFLDFFSKAIQCARQEKSSSGLNHILAALTIFLKTLAVNFRIRVCELGDEILPTLLYIWTQHRLNDSLKEVIIELFQLQIYIHHPKGAKTQEKGAYESTKWRSILYNLYDLLVNEISHIGSRGKYSSGFRNIAVKENLIELMADICHQVFNEDTRSLEISQSYTTTQRESSDYSVPCKRKKIELGWEVIKDHLQKSQNDFDLVPWLQIATQLISKYPASLPNCELSPLLMILSQLLPQQRHGERTPYVLRCLTEVALCQDKRSNLESSQKSDLLKLWNKIWCITFRGISSEQIQAENFGLLGAIIQGSLVEVDREFWKLFTGSACRPSCPAVCCLTLALTTSIVPGTVKMGIEQNMCEVNRSFSLKESIMKWLLFYQLEGDLENSTEVPPILHSNFPHLVLEKILVSLTMKNCKAAMNFFQSVPECEHHQKDKEELSFSEVEELFLQTTFDKMDFLTIVRECGIEKHQSSIGFSVHQNLKESLDRCLLGLSEQLLNNYSSEITNSETLVRCSRLLVGVLGCYCYMGVIAEEEAYKSELFQKAKSLMQCAGESITLFKNKTNEEFRIGSLRNMMQLCTRCLSNCTKKSPNKIASGFFLRLLTSKLMNDIADICKSLASFIKKPFDRGEVESMEDDTNGNLMEVEDQSSMNLFNDYPDSSVSDANEPGESQSTIGAINPLAEEYLSKQDLLFLDMLKFLCLCVTTAQTNTVSFRAADIRRKLLMLIDSSTLEPTKSLHLHMYLMLLKELPGEEYPLPMEDVLELLKPLSNVCSLYRRDQDVCKTILNHVLHVVKNLGQSNMDSENTRDAQGQFLTVIGAFWHLTKERKYIFSVRMALVNCLKTLLEADPYSKWAILNVMGKDFPVNEVFTQFLADNHHQVRMLAAESINRLFQDTKGDSSRLLKALPLKLQQTAFENAYLKAQEGMREMSHSAENPETLDEIYNRKSVLLTLIAVVLSCSPICEKQALFALCKSVKENGLEPHLVKKVLEKVSETFGYRRLEDFMASHLDYLVLEWLNLQDTEYNLSSFPFILLNYTNIEDFYRSCYKVLIPHLVIRSHFDEVKSIANQIQEDWKSLLTDCFPKILVNILPYFAYEGTRDSGMAQQRETATKVYDMLKSENLLGKQIDHLFISNLPEIVVELLMTLHEPANSSASQSTDLCDFSGDLDPAPNPPHFPSHVIKATFAYISNCHKTKLKSILEILSKSPDSYQKILLAICEQAAETNNVYKKHRILKIYHLFVSLLLKDIKSGLGGAWAFVLRDVIYTLIHYINQRPSCIMDVSLRSFSLCCDLLSQVCQTAVTYCKDALENHLHVIVGTLIPLVYEQVEVQKQVLDLLKYLVIDNKDNENLYITIKLLDPFPDHVVFKDLRITQQKIKYSRGPFSLLEEINHFLSVSVYDALPLTRLEGLKDLRRQLELHKDQMVDIMRASQDNPQDGIMVKLVVNLLQLSKMAINHTGEKEVLEAVGSCLGEVGPIDFSTIAIQHSKDASYTKALKLFEDKELQWTFIMLTYLNNTLVEDCVKVRSAAVTCLKNILATKTGHSFWEIYKMTTDPMLAYLQPFRTSRKKFLEVPRFDKENPFEGLDDINLWIPLSENHDIWIKTLTCAFLDSGGTKCEILQLLKPMCEVKTDFCQTVLPYLIHDILLQDTNESWRNLLSTHVQGFFTSCLRHFSQTSRSTTPANLDSESEHFFRCCLDKKSQRTMLAVVDYMRRQKRPSSGTIFNDAFWLDLNYLEVAKVAQSCAAHFTALLYAEIYADKKSMDDQEKRSLAFEEGSQSTTISSLSEKSKEETGISLQDLLLEIYRSIGEPDSLYGCGGGKMLQPITRLRTYEHEAMWGKALVTYDLETAIPSSTRQAGIIQALQNLGLCHILSVYLKGLDYENKDWCPELEELHYQAAWRNMQWDHCTSVSKEVEGTSYHESLYNALQSLRDREFSTFYESLKYARVKEVEEMCKRSLESVYSLYPTLSRLQAIGELESIGELFSRSVTHRQLSEVYIKWQKHSQLLKDSDFSFQEPIMALRTVILEILMEKEMDNSQRECIKDILTKHLVELSILARTFKNTQLPERAIFQIKQYNSVSCGVSEWQLEEAQVFWAKKEQSLALSILKQMIKKLDASCAANNPSLKLTYTECLRVCGNWLAETCLENPAVIMQTYLEKAVEVAGNYDGESSDELRNGKMKAFLSLARFSDTQYQRIENYMKSSEFENKQALLKRAKEEVGLLREHKIQTNRYTVKVQRELELDELALRALKEDRKRFLCKAVENYINCLLSGEEHDMWVFRLCSLWLENSGVSEVNGMMKRDGMKIPTYKFLPLMYQLAARMGTKMMGGLGFHEVLNNLISRISMDHPHHTLFIILALANANRDEFLTKPEVARRSRITKNVPKQSSQLDEDRTEAANRIICTIRSRRPQMVRSVEALCDAYIILANLDATQWKTQRKGINIPADQPITKLKNLEDVVVPTMEIKVDHTGEYGNLVTIQSFKAEFRLAGGVNLPKIIDCVGSDGKERRQLVKGRDDLRQDAVMQQVFQMCNTLLQRNTETRKRKLTICTYKVVPLSQRSGVLEWCTGTVPIGEFLVNNEDGAHKRYRPNDFSAFQCQKKMMEVQKKSFEEKYEVFMDVCQNFQPVFRYFCMEKFLDPAIWFEKRLAYTRSVATSSIVGYILGLGDRHVQNILINEQSAELVHIDLGVAFEQGKILPTPETVPFRLTRDIVDGMGITGVEGVFRRCCEKTMEVMRNSQETLLTIVEVLLYDPLFDWTMNPLKALYLQQRPEDETELHPTLNADDQECKRNLSDIDQSFNKVAERVLMRLQEKLKGVEEGTVLSVGGQVNLLIQQAIDPKNLSRLFPGWKAWV

SEQ ID NO: 49 - protein, 756 aa, Homo sapiens
MSWSPSLTTQTCGAWEMKERLGTGGFGNVIRWHNQETGEQIAIKQCRQELSPRNRERWCLEIQIMRRLTHPNVVAARDVPEGMQNLAPNDLPLLAMEYCQGGDLRKYLNQFENCCGLREGAILTLLSDIASALRYLHENRIIHRDLKPENIVLQQGEQRLIHKIIDLGYAKELDQGSLCTSFVGTLQYLAPELLEQQKYTVTVDYWSFGTLAFECITGFRPFLPNWQPVQWHSKVRQKSEVDIVVSEDLNGTVKFSSSLPYPNNLNSVLAERLEKWLQLMLMWHPRQRGTDPTYGPNGCFKALDDILNLKLVHILNMVTGTIHTYPVTEDESLQSLKARIQQDTGIPEEDQELLQEAGLALIPDKPATQCISDGKLNEGHTLDMDLVFLFDNSKITYETQISPRPQPESVSCILQEPKRNLAFFQLRKVWGQVWHSIQTLKEDCNRLQQGQRAAMMNLLRNNSCLSKMKNSMASMSQQLKAKLDFFKTSIQIDLEKYSEQTEFGITSDKLLLAWREMEQAVELCGRENEVKLLVERMMALQTDIVDLQRSPMGRKQGGTLDDLEEQARELYRRLREKPRDQRTEGDSQEMVRLLLQAIQSFEKKVRVIYTQLSKTVVCKQKALELLPKVEEVVSLMNEDEKTVVRLQEKRQKELWNLLKIACSKVRGPVSGSPDSMNASRLSQPGQLMSQPSTASNSLPEPAKKSEELVAEAHNLCTLLENAIQDTVREQDQSFTALDWSWLQTEEEEHSCLEQAS

SEQ ID NO: 50 - protein, 754 aa, Homo sapiens
MFSGGCHSPGFGRPSPAFPAPGSPPPAPRPCRQETGEQIAIKQCRQELSPRNRERWCLEIQIMRRLTHPNVVAARDVPEGMQNLAPNDLPLLAMEYCQGGDLRKYLNQFENCCGLREGAILTLLSDIASALRYLHENRIIHRDLKPENIVLQQGEQRLIHKIIDLGYAKELDQGSLCTSFVGTLQYLAPELLEQQKYTVTVDYWSFGTLAFECITGFRPFLPNWQPVQWHSKVRQKSEVDIVVSEDLNGTVKFSSSLPYPNNLNSVLAERLEKWLQLMLMWHPRQRGTDPTYGPNGCFKALDDILNLKLVHILNMVTGTIHTYPVTEDESLQSLKARIQQDTGIPEEDQELLQEAGLALIPDKPATQCISDGKLNEGHTLDMDLVFLFDNSKITYETQISPRPQPESVSCILQEPKRNLAFFQLRKVWGQVWHSIQTLKEDCNRLQQGQRAAMMNLLRNNSCLSKMKNSMASMSQQLKAKLDFFKTSIQIDLEKYSEQTEFGITSDKLLLAWREMEQAVELCGRENEVKLLVERMMALQTDIVDLQRSPMGRKQGGTLDDLEEQARELYRRLREKPRDQRTEGDSQEMVRLLLQAIQSFEKKVRVIYTQLSKTVVCKQKALELLPKVEEVVSLMNEDEKTVVRLQEKRQKELWNLLKIACSKVRGPVSGSPDSMNASRLSQPGQLMSQPSTASNSLPEPAKKSEELVAEAHNLCTLLENAIQDTVREQDQSFTALDWSWLQTEEEEHSCLEQAS

SEQ ID NO: 51 - protein, 256 aa, Homo sapiens
MSWSPSLTTQTCGAWEMKERLGTGGFGNVIRWHNQETGEQIAIKQCRQELSPRNRERWCLEIQIMRRLTHPNVVAARDVPEGMQNLAPNDLPLLAMEYCQGGDLRKYLNQFENCCGLREGAILTLLSDIASALRYLHENRIIHRDLKPENIVLQQGEQRLIHKIIDLGYAKELDQGSLCTSFVGTLQYLAPELLEQQKYTVTVDYWSFGTLAFECITGFRPFLPNWQPVQCVRMWPGTVAHSCNPSTLGGRGRWIS

SEQ ID NO: 52 - protein, 697 aa, Homo sapiens
MSSDGTIRLTHPNVVAARDVPEGMQNLAPNDLPLLAMEYCQGGDLRKYLNQFENCCGLREGAILTLLSDIASALRYLHENRIIHRDLKPENIVLQQGEQRLIHKIIDLGYAKELDQGSLCTSFVGTLQYLAPELLEQQKYTVTVDYWSFGTLAFECITGFRPFLPNWQPVQWHSKVRQKSEVDIVVSEDLNGTVKFSSSLPYPNNLNSVLAERLEKWLQLMLMWHPRQRGTDPTYGPNGCFKALDDILNLKLVHILNMVTGTIHTYPVTEDESLQSLKARIQQDTGIPEEDQELLQEAGLALIPDKPATQCISDGKLNEGHTLDMDLVFLFDNSKITYETQISPRPQPESVSCILQEPKRNLAFFQLRKVWGQVWHSIQTLKEDCNRLQQGQRAAMMNLLRNNSCLSKMKNSMASMSQQLKAKLDFFKTSIQIDLEKYSEQTEFGITSDKLLLAWREMEQAVELCGRENEVKLLVERMMALQTDIVDLQRSPMGRKQGGTLDDLEEQARELYRRLREKPRDQRTEGDSQEMVRLLLQAIQSFEKKVRVIYTQLSKTVVCKQKALELLPKVEEVVSLMNEDEKTVVRLQEKRQKELWNLLKIACSKVRGPVSGSPDSMNASRLSQPGQLMSQPSTASNSLPEPAKKSEELVAEAHNLCTLLENAIQDTVREQDQSFTALDWSWLQTEEEEHSCLEQAS

SEQ ID NO: 53 - protein, 246 aa, Homo sapiens
MSLQWTAVATFLYAEVFVVLLLCIPFISPKRWQKIFKSRLVELLVSYGNTFFVVLIVILVLLVIDAVREIRKYDDVTEKVNLQNNPGAMEHFHMKLFRAQRNLYIAGFSLLLSFLLRRLVTLISQQATLLASNEAFKKQAESASEAAKKYMEENDQLKKGAAVDGGKLDVGNAEVKLEEENRSLKADLQKLKDELASTKQKLEKAENQVLAMRKQSEGLTKEYDRLLEEHAKLQAAVDGPMDKKEE

SEQ ID NO: 54 - protein, 313 aa, Homo sapiens
MGAEASSSWCPGTALPEERLSVKRASEISGFLGQGSSGEAALDVLTHVLEGAGNKLTSSCGKPSSNRMSLQWTAVATFLYAEVFVVLLLCIPFISPKRWQKIFKSRLVELLVSYGNTFFVVLIVILVLLVIDAVREIRKYDDVTEKVNLQNNPGAMEHFHMKLFRAQRNLYIAGFSLLLSFLLRRLVTLISQQATLLASNEAFKKQAESASEAAKKYMEENDQLKKGAAVDGGKLDVGNAEVKLEEENRSLKADLQKLKDELASTKQKLEKAENQVLAMRKQSEGLTKEYDRLLEEHAKLQAAVDGPMDKKEE

SEQ ID NO: 55 - protein, 448 aa, Homo sapiens
MKSLSLLLAVALGLATAVSAGPAVIECWFVEDASGKGLAKRPGALLLRQGPGEPPPRPDLDPELYLSVHDPAGALQAAFRRYPRGAPAPHCEMSRFVPLPASAKWASGLTPAQNCPRALDGAWLMVSISSPVLSLSSLLRPQPEPQQEPVLITMATVVLTVLTHTPAPRVRLGQDALLDLSFAYMPPTSEAASSLAPGPPPFGLEWRRQHLGKGHLLLAATPGLNGQMPAAQEGAVAFAAWDDDEPWGPWTGNGTFWLPRVQPFQEGTYLATIHLPYLQGQVTLELAVYKPPKVSLMPATLARAAPGEAPPELLCLVSHFYPSGGLEVEWELRGGPGGRSQKAEGQRWLSALRHHSDGSVSLSGHLQPPPVTTEQHGARYACRIHHPSLPASGRSAEVTLEVAGLSGPSLEDSVGLFLSAFLLLGLFKALGWAAVYLSTCKDSKKKAE

SEQ ID NO: 56 - protein, 412 aa, Homo sapiens [sequence omitted]

SEQ ID NO: 57 - protein, 504 aa, Homo sapiens [sequence omitted]

SEQ ID NO: 58 - protein, 361 aa, Homo sapiens [sequence omitted]

SEQ ID NO: 59 - protein, 524 aa, Homo sapiens
MAAPEPARAAPPPPPPPPPPPGADRVVKAVPFPPTHRLTSEEVFDLDGIPRVDVLKNHLVKEGRVDEEIALRIINEGAAILRREKTMIEVEAPITVCGDIHGQFFDLMKLFEVGGSPANTRYLFLGDYVDRGYFSIECVLYLWVLKILYPSTLFLLRGNHECRHLTEYFTFKQECKIKYSERVYEACMEAFDSLPLAALLNQQFLCVHGGLSPEIHTLDDIRRLDRFKEPPAFGPMCDLLWSDPSEDFGNEKSQEHFSHNTVRGCSYFYNYPAVCEFLQNNNLLSIIRAHEAQDAGYRMYRKSQTTGFPSLITIFSAPNYLDVYNNKAAVLKYENNVMNIRQFNCSPHPYWLPNFMDVFTWSLPFVGEKVTEMLVNVLSICSDDELMTEGEDQFDGSAAARKEIIRNKIRAIGKMARVFSVLREESESVLTLKGLTPTGMLPSGVLAGGRQTLQSATVEAIEAEKAIRGFSPPHRICSFEEAKGLDRINERMPPRKDAVQQDGFNSLNTAHATENHGTGNHTAQ

SEQ ID NO: 60 - protein, 514 aa, Homo sapiens
MAAPEPARAAPPPPPPPPPPPGADRVVKAVPFPPTHRLTSEEVFDLDGIPRVDVLKNHLVKEGRVDEEIALRIINEGAAILRREKTMIEVEAPITVCGDIHGQFFDLMKLFEVGGSPANTRYLFLGDYVDRGYFSIEHVLGTEDISINPHNNINECVLYLWVLKILYPSTLFLLRGNHECRHLTEYFTFKQECKIKYSERVYEACMEAFDSLPLAALLNQQFLCVHGGLSPEIHTLDDIRRLDRFKEPPAFGPMCDLLWSDPSEDFGNEKSQEHFSHNTVRGCSYFYNYPAVCEFLQNNNLLSIIRAHEAQDAGYRMYRKSQTTGFPSLITIFSAPNYLDVYNNKAAVLKYENNVMNIRQFNCSPHPYWLPNFMDVFTWSLPFVGEKVTEMLVNVLSICSDDELMTEGEDQFDGSAAARKEIIRNKIRAIGKMARVFSVLREESESVLTLKGLTPTGMLPSGVLAGGRQTLQSGNDVMQLAVPQMDWGTPHSFANNSHNACREFLLFFSSCLSS

SEQ ID NO: 61 - protein, 515 aa, Homo sapiens
MAAPEPARAAPPPPPPPPPPPGADRVVKAVPFPPTHRLTSEEVFDLDGIPRVDVLKNHLVKEGRVDEEIALRIINEGAAILRREKTMIEVEAPITVCGDIHGQFFDLMKLFEVGGSPANTRYLFLGDYVDRGYFSIECVLYLWVLKILYPSTLFLLRGNHECRHLTEYFTFKQECKIKYSERVYEACMEAFDSLPLAALLNQQFLCVHGGLSPEIHTLDDIRRLDRFKEPPAFGPMCDLLWSDPSEDFGNEKSQEHFSHNTVRGCSYFYNYPAVCEFLQNNNLLSIIRAHEAQDAGYRMYRKSQTTGFPSLITIFSAPNYLDVYNNKAAVLKYENNVMNIRQFNCSPHPYWLPNFMDVFTWSLPFVGEKVTEMLVNVLSICSDDELMTEGEDQFDVGSAAARKEIIRNKIRAIGKMARVFSVLREESESVLTLKGLTPTGMLPSGVLAGGRQTLQSAIRGFSPPHRICSFEEAKGLDRINERMPPRKDAVQQDGFNSLNTAHATENHGTGNHTAQ

SEQ ID NO: 62 - protein, 525 aa, Homo sapiens
MAAPEPARAAPPPPPPPPPPPGADRVVKAVPFPPTHRLTSEEVFDLDGIPRVDVLKNHLVKEGRVDEEIALRIINEGAAILRREKTMIEVEAPITVCGDIHGQFFDLMKLFEVGGSPANTRYLFLGDYVDRGYFSIECVLYLWVLKILYPSTLFLLRGNHECRHLTEYFTFKQECKIKYSERVYEACMEAFDSLPLAALLNQQFLCVHGGLSPEIHTLDDIRRLDRFKEPPAFGPMCDLLWSDPSEDFGNEKSQEHFSHNTVRGCSYFYNYPAVCEFLQNNNLLSIIRAHEAQDAGYRMYRKSQTTGFPSLITIFSAPNYLDVYNNKAAVLKYENNVMNIRQFNCSPHPYWLPNFMDVFTWSLPFVGEKVTEMLVNVLSICSDDELMTEGEDQFDVGSAAARKEIIRNKIRAIGKMARVFSVLREESESVLTLKGLTPTGMLPSGVLAGGRQTLQSATVEAIEAEKAIRGFSPPHRICSFEEAKGLDRINERMPPRKDAVQQDGFNSLNTAHATENHGTGNHTAQ

SEQ ID NO: 63 - protein, 346 aa, Homo sapiens
MAMVSEFLKQAWFIENEEQEYVQTVKSSKGGPGSAVSPYPTFNPSSDVAALHKAIMVKGVDEATIIDILTKRNNAQRQQIKAAYLQETGKPLDETLKKALTGHLEEVVLALLKTPAQFDADELRAAMKGLGTDEDTLIEILASRTNKEIRDINRVYREELKRDLAKDITSDTSGDFRNALLSLAKGDRSEDFGVNEDLADSDARALYEAGERRKGTDVNVFNTILTTRSYPQLRRVFQKYTKYSKHDMNKVLDLELKGDIEKCLTAIVKCATSKPAFFAEKLHQAMKGVGTRHKALIRIMVSRSEIDMNDIKAFYQKMYGISLCQAILDETKGDYEKILVALCGGN

SEQ ID NO: 64 - protein, 745 aa, Homo sapiens
MGVPFFSSLRCMVDLGPCWAGGLTAEMKLLLALAGLLAILATPQPSEGAAPAVLGEVDTSLVLSSMEEAKQLVDKAYKERRESIKQRLRSGSASPMELLSYFKQPVAATRTAVRAADYLHVALDLLERKLRSLWRRPFNVTDVLTPAQLNVLSKSSGCAYQDVGVTCPEQDKYRTITGMCNNRRSPTLGASNRAFVRWLPAEYEDGFSLPYGWTPGVKRNGFPVALARAVSNEIVRFPTDQLTPDQERSLMFMQWGQLLDHDLDFTPEPAARASFVTGVNCETSCVQQPPCFPLKIPPNDPRIKNQADCIPFFRSCPACPGSNITIRNQINALTSFVDASMVYGSEEPLARNLRNMSNQLGLLAVNQRFQDNGRALLPFDNLHDDPCLLTNRSARIPCFLAGDTRSSEMPELTSMHTLLLREHNRLATELKSLNPRWDGERLYQEARKIVGAMVQIITYRDYLPLVLGPTAMRKYLPTYRSYNDSVDPRIANVFTNAFRYGHTLIQPFMFRLDNRYQPMEPNPRVPLSRVFFASWRVVLEGGIDPILRGLMATPAKLNRQNQIAVDEIRERLFEQVMRIGLDLPALNMQRSRDHGLPGYNAWRRFCGLPQPETVGQLGTVLRNLKLARKLMEQYGTPNNIDIWMGGVSEPLKRKGRVGPLLACIIGTQFRKLRDGDRFWWENEGVFSMQQRQALAQISLPRIICDNTGITTVSKNNIFMSNSYPRDFVNCSTLPALNLASWREAS

SEQ ID NO: 65 - protein, 650 aa, Homo sapiens
MELLSYFKQPVAATRTAVRAADYLHVALDLLERKLRSLWRRPFNVTDVLTPAQLNVLSKSSGCAYQDVGVTCPEQDKYRTITGMCNNRRSPTLGASNRAFVRWLPAEYEDGFSLPYGWTPGVKRNGFPVALARAVSNEIVRFPTDQLTPDQERSLMFMQWGQLLDHDLDFTPEPAARASFVTGVNCETSCVQQPPCFPLKIPPNDPRIKNQADCIPFFRSCPACPGSNITIRNQINALTSFVDASMVYGSEEPLARNLRNMSNQLGLLAVNQRFQDNGRALLPFDNLHDDPCLLTNRSARIPCFLAGDTRSSEMPELTSMHTLLLREHNRLATELKSLNPRWDGERLYQEARKIVGAMVQIITYRDYLPLVLGPTAMRKYLPTYRSYNDSVDPRIANVFTNAFRYGHTLIQPFMFRLDNRYQPMEPNPRVPLSRVFFASWRVVLEGGIDPILRGLMATPAKLNRQNQIAVDEIRERLFEQVMRIGLDLPALNMQRSRDHGLPGYNAWRRFCGLPQPETVGQLGTVLRNLKLARKLMEQYGTPNNIDIWMGGVSEPLKRKGRVGPLLACIIGTQFRKLRDGDRFWWENEGVFSMQQRQALAQISLPRIICDNTGITTVSKNNIFMSNSYPRDFVNCSTLPALNLASWREAS

SEQ ID NO: 66 - protein, 777 aa, Homo sapiens
MGVPFFSSLRCMVDLGPCWAGGLTAEMKLLLALAGLLAILATPQPSEGAAPAVLGEVDTSLVLSSMEEAKQLVDKAYKERRESIKQRLRSGSASPMELLSYFKQPVAATRTAVRAADYLHVALDLLERKLRSLWRRPFNVTDVLTPAQLNVLSKSSGCAYQDVGVTCPEQDKYRTITGMCNNRCGWLGVAAGTGLREASRTPQASRCQRPVLPCRRSPTLGASNRAFVRWLPAEYEDGFSLPYGWTPGVKRNGFPVALARAVSNEIVRFPTDQLTPDQERSLMFMQWGQLLDHDLDFTPEPAARASFVTGVNCETSCVQQPPCFPLKIPPNDPRIKNQADCIPFFRSCPACPGSNITIRNQINALTSFVDASMVYGSEEPLARNLRNMSNQLGLLAVNQRFQDNGRALLPFDNLHDDPCLLTNRSARIPCFLAGDTRSSEMPELTSMHTLLLREHNRLATELKSLNPRWDGERLYQEARKIVGAMVQIITYRDYLPLVLGPTAMRKYLPTYRSYNDSVDPRIANVFTNAFRYGHTLIQPFMFRLDNRYQPMEPNPRVPLSRVFFASWRVVLEGGIDPILRGLMATPAKLNRQNQIAVDEIRERLFEQVMRIGLDLPALNMQRSRDHGLPGYNAWRRFCGLPQPETVGQLGTVLRNLKLARKLMEQYGTPNNIDIWMGGVSEPLKRKGRVGPLLACIIGTQFRKLRDGDRFWWENEGVFSMQQRQALAQISLPRIICDNTGITTVSKNNIFMSNSYPRDFVNCSTLPALNLASWREAS

SEQ ID NO: 67 - protein, 4684 aa, Homo sapiens
MVAGMLMPRDQLRAIYEVLFREGVMVAKKDRRPRSLHPHVPGVTNLQVMRAMASLRARGLVRETFAWCHFYWYLTNEGIAHLRQYLHLPPEIVPASLQRVRRPVAMVMPARRTPHVQAVQGPLGSPPKRGPLPTEEQRVYRRKELEEVSPETPVVPATTQRTLARPGPEPAPATDERDRVQKKTFTKWVNKHLIKAQRHISDLYEDLRDGHNLISLLEVLSGDSLPREKGRMRFHKLQNVQIALDYLRHRQVKLVNIRNDDIADGNPKLTLGLIWTIILHFQISDIQVSGQSEDMTAKEKLLLWSQRMVEGYQGLRCDNFTSSWRDGRLFNAIIHRHKPLLIDMNKVYRQTNLENLDQAFSVAERDLGVTRLLDPEDVDVPQPDEKSIITYVSSLYDAMPRVPDVQDGVRANELQLRWQEYRELVLLLLQWMRHHTAAFEERRFPSSFEEIEILWSQFLKFKEMELPAKEADKNRSKGIYQSLEGAVQAGQLKVPPGYHPLDVEKEWGKLHVAILEREKQLRSEFERLECLQRIVTKLQMEAGLCEEQLNQADALLQSDVRLLAAGKVPQRAGEVERDLDKADSMIRLLFNDVQTLKDGRHPQGEQMYRRVYRLHERLVAIRTEYNLRLKAGVAAPATQVAQVTLQSVQRRPELEDSTLRYLQDLLAWVEENQHRVDGAEWGVDLPSVEAQLGSHRGLHQSIEEFRAKIERARSDEGQLSPATRGAYRDCLGRLDLQYAKLLNSSKARLRSLESLHSFVAAATKELMWLNEKEEEEVGFDWSDRNTNMTAKKESYSALMRELELKEKKIKELQNAGDRLLREDHPARPTVESFQAALQTQWSWMLQLCCCIEAHLKENAAYFQFFSDVREAEGQLQKLQEALRRKYSCDRSATVTRLEDLLQDAQDEKEQLNEYKGHLSGLAKRAKAVVQLKPRHPAHPMRGRLPLLAVCDYKQVEVTVHKGDECQLVGPAQPSHWKVLSSSGSEAAVPSVCFLVPPPNQEAQEAVTRLEAQHQALVTLWHQLHVDMKSLLAWQSLRRDVQLIRSWSLATFRTLKPEEQRQALHSLELHYQAFLRDSQDAGGFGPEDRLMAEREYGSCSHHYQQLLQSLEQGAQEESRCQRCISELKDIRLQLEACETRTVHRLRLPLDKEPARECAQRIAEQQKAQAEVEGLGKGVARLSAEAEKVLALPEPSPAAPTLRSELELTLGKLEQVRSLSAIYLEKLKTISLVIRGTQGAEEVLRAHEEQLKEAQAVPATLPELEATKASLKKLRAQAEAQQPTFDALRDELRGAQEVGERLQQRHGERDVEVERWRERVAQLLERWQAVLAQTDVRQRELEQLGRQLRYYRESADPLGAWLQDARRRQEQIQAMPLADSQAVREQLRQEQALLEEIERHGEKVEECQRFAKQYINAIKDYELQLVTYKAQLEPVASPAKKPKVQSGSESVIQEYVDLRTHYSELTTLTSQYIKFISETLRRMEEEERLAEQQRAEERERLAEVEAALEKQRQLAEAHAQAKAQAEREAKELQQRMQEEVVRREEAAVDAQQQKRSIQEELQQLRQSSEAEIQAKARQAEAAERSRLRIEEEIRVVRLQLEATERQRGGAEGELQALRARAEEAEAQKRQAQEEAERLRRQVQDESQRKRQAEVELASRVKAEAEAAREKQRALQALEELRLQAEEAERRLRQAEVERARQVQVALETAQRSAEAELQSKRASFAEKTAQLERSLQEEHVAVAQLREEAERRAQQQAEAERAREEAERELERWQLKANEALRLRLQAEEVAQQKSLAQAEAEKQKEEAEREARRRGKAEEQAVRQRELAEQELEKQRQLAEGTAQQRLAAEQELIRLRAETEQGEQQRQLLEEELARLQREAAAATQKRQELEAELAKVRAEMEVLLASKARAEEESRSTSEKSKQRLEAEAGRFRELAEEAARLRALAEEAKRQRQLAEEDAARQRAEAERVLAEKLAAIGEATRLKTEAEIALKEKEAENERLRRLAEDEAFQRRRLEEQAAQHKADIEERLAQLRKASDSELERQKGLVEDTLRQRRQVEEEILALKASFEKAAAGKAELELELGRIRSNAEDTLRSKEQAELEAARQRQLAAEEERRRREAEERVQKSLAAEEEAARQRKAALEEVERLKAKVEEARRLRERAEQESARQLQLAQEAAQKRLQAEEKAHAFAVQQKEQELQQTLQQEQSVLDQLRGEAEAARRAAEEAEEARVQAEREAAQSRRQVEEAERLKQSAEEQAQARAQAQAAAEKLRKEAEQEAARRAQAEQAALRQKQAADAEMEKHKKFAEQTLRQKAQVEQELTTLRLQLEETDHQKNLLDEELQRLKAEATEAARQRSQVEEELFSVRVQMEELSKLKARIEAENRALILRDKDNTQRFLQEEAEKMKQVAEEAARLSVAAQEAARLRQLAEEDLAQQRALAEKMLKEKMQAVQEATRLKAEAELLQQQKELAQEQARRLQEDKEQMAQQLAEETQGFQRTLEAERQRQLEMSAEAERLKLRVAEMSRAQARAEEDAQRFRKQAEEIGEKLHRTELATQEKVTLVQTLEIQRQQSDHDAERLREAIAELEREKEKLQQEAKLLQLKSEEMQTVQQEQLLQETQALQQSFLSEKDSLLQRERFIEQEKAKLEQLFQDEVAKAQQLREEQQRQQQQMEQERQRLVASMEEARRRQHEAEEGVRRKQEELQQLEQQRRQQEELLAEENQRLREQLQLLEEQHRAALAHSEEVTASQVAATKTLPNGRDALDGPAAEAEPEHSFDGLRRKVSAQRLQEAGILSAEELQRLAQGHTTVDELARREDVRHYLQGRSSIAGLLLKATNEKLSVYAALQRQLLSPGTALILLEAQAASGFLLDPVRNRRLTVNEAVKEGVVGPELHHKLLSAERAVTGYKDPYTGQQISLFQAMQKGLIVREHGIRLLEAQIATGGVIDPVHSHRVPVDVAYRRGYFDEEMNRVLADPSDDTKGFFDPNTHENLTYLQLLERCVEDPETGLCLLPLTDKAAKGGELVYTDSEARDVFEKATVSAPFGKFQGKTVTIWEIINSEYFTAEQRRDLLRQFRTGRITVEKIIKIIITVVEEQEQKGRLCFEGLRSLVPAAELLESRVIDRELYQQLQRGERSVRDVAEVDTVRRALRGANVIAGVWLEEAGQKLSIYNALKKDLLPSDMAVALLEAQAGTGHIIDPATSARLTVDEAVRAGLVGPEFHEKLLSAEKAVTGYRDPYTGQSVSLFQALKKGLIPREQGLRLLDAQLSTGGIVDPSKSHRVPLDVACARGCLDEETSRALSAPRADAKAYSDPSTGEPATYGELQQRCRPDQLTGLSLLPLSEKAARARQEELYSELQARETFEKTPVEVPVGGFKGRTVTVWELISSEYFTAEQRQELLRQFRTGKVTVEKVIKILITIVEEVETLRQERLSFSGLRAPVPASELLASGVLSRAQFEQLKDGKTTVKDLSELGSVRTLLQGSGCLAGIYLEDTKEKVSIYEAMRRGLLRATTAALLLEAQAATGFLVDPVRNQRLYVHEAVKAGVVGPELHEQLLSAEKAVTGYRDPYSGSTISLFQAMQKGLVLRQHGIRLLEAQIATGGIIDPVHSHRVPVDVAYQRGYFSEEMNRVLADPSDDTKGFFDPNTHENLTYRQLLERCVEDPETGLRLLPLKGAEKAEVVETTQVYTEEETRRAFEETQIDIPGGGSHGGSTMSLWEVMQSDLIPEEQRAQLMADFQAGRVTKERMIIIIIEIIEKTEIIRQQGLASYDYVRRRLTAEDLFEARIISLETYNLLREGTRSLREALEAESAWCYLYGTGSVAGVYLPGSRQTLSIYQALKKGLLSAEVARLLLEAQAATGFLLDPVKGERLTVDEAVRKGLVGPELHDRLLSAERAVTGYRDPYTEQTISLFQAMKKELIPTEEALRLLDAQLATGGIVDPRLGFHLPLEVAYQRGYLNKDTHDQLSEPSEVRSYVDPSTDERLSYTQLLRRCRRDDGTGQLLLPLSDARKLTFRGLRKQITMEELVRSQVMDEATALQLREGLTSIEEVTKNLQKFLEGTSCIAGVFVDATKERLSVYQAMKKGIIRPGTAFELLEAQAATGYVIDPIKGLKLTVEEAVRMGIVGPEFKDKLLSAERAVTGYKDPYSGKLISLFQAMKKGLILKDHGIRLLEAQIATGGIIDPEESHRLPVEVAYKRGLFDEEMNEILTDPSDDTKGFFDPNTEENLTYLQLMERCITDPQTGLCLLPLKEKKRERKTSSKSSVRKRRVVIVDPETGKEMSVYEAYRKGLIDHQTYLELSEQECEWEEITISSSDGVVKSMIIDRRSGRQYDIDDAIAKNLIDRSALDQYRAGTLSITEFADMLSGNAGGFRSRSSSVGSSSSYPISPAVSRTQLASWSDPTEETGPVAGILDTETLEKVSITEAMHRNLVDNITGQRLLEAQACTGGIIDPSTGERFPVTDAVNKGLVDKIMVDRINLAQKAFCGFEDPRTKTKMSAAQALKKGWLYYEAGQRFLEVQYLTGGLIEPDTPGRVPLDEALQRGTVDARTAQKLRDVGAYSKYLTCPKTKLKISYKDALDRSMVEEGTGLRLLEAAAQSTKGYYSPYSVSGSGSTAGSRTGSRTGSRAGSRRGSFDATGSGFSMTFSSSSYSSSGYGRRYASGSSASLGGPESAVA

SEQ ID NO: 68 - protein, 4574 aa, Homo sapiens
MSGEDAEVRAVSEDVSNGSSGSPSPGDTLPWNLGKTQRSRRSGGGAGSNGSVLDPAERAVIRIADERDRVQKKTFTKWVNKHLIKAQRHISDLYEDLRDGHNLISLLEVLSGDSLPREKGRMRFHKLQNVQIALDYLRHRQVKLVNIRNDDIADGNPKLTLGLIWTIILHFQISDIQVSGQSEDMTAKEKLLLWSQRMVEGYQGLRCDNFTSSWRDGRLFNAIIHRHKPLLIDMNKVYRQTNLENLDQAFSVAERDLGVTRLLDPEDVDVPQPDEKSIITYVSSLYDAMPRVPDVQDGVRANELQLRWQEYRELVLLLLQWMRHHTAAFEERRFPSSFEEIEILWSQFLKFKEMELPAKEADKNRSKGIYQSLEGAVQAGQLKVPPGYHPLDVEKEWGKLHVAILEREKQLRSEFERLECLQRIVTKLQMEAGLCEEQLNQADALLQSDVRLLAAGKVPQRAGEVERDLDKADSMIRLLFNDVQTLKDGRHPQGEQMYRRVYRLHERLVAIRTEYNLRLKAGVAAPATQVAQVTLQSVQRRPELEDSTLRYLQDLLAWVEENQHRVDGAEWGVDLPSVEAQLGSHRGLHQSIEEFRAKIERARSDEGQLSPATRGAYRDCLGRLDLQYAKLLNSSKARLRSLESLHSFVAAATKELMWLNEKEEEEVGFDWSDRNTNMTAKKESYSALMRELELKEKKIKELQNAGDRLLREDHPARPTVESFQAALQTQWSWMLQLCCCIEAHLKENAAYFQFFSDVREAEGQLQKLQEALRRKYSCDRSATVTRLEDLLQDAQDEKEQLNEYKGHLSGLAKRAKAVVQLKPRHPAHPMRGRLPLLAVCDYKQVEVTVHKGDECQLVGPAQPSHWKVLSSSGSEAAVPSVCFLVPPPNQEAQEAVTRLEAQHQALVTLWHQLHVDMKSLLAWQSLRRDVQLIRSWSLATFRTLKPEEQRQALHSLELHYQAFLRDSQDAGGFGPEDRLMAEREYGSCSHHYQQLLQSLEQGAQEESRCQRCISELKDIRLQLEACETRTVHRLRLPLDKEPARECAQRIAEQQKAQAEVEGLGKGVARLSAEAEKVLALPEPSPAAPTLRSELELTLGKLEQVRSLSAIYLEKLKTISLVIRGTQGAEEVLRAHEEQLKEAQAVPATLPELEATKASLKKLRAQAEAQQPTFDALRDELRGAQEVGERLQQRHGERDVEVERWRERVAQLLERWQAVLAQTDVRQRELEQLGRQLRYYRESADPLGAWLQDARRRQEQIQAMPLADSQAVREQLRQEQALLEEIERHGEKVEECQRFAKQYINAIKDYELQLVTYKAQLEPVASPAKKPKVQSGSESVIQEYVDLRTHYSELTTLTSQYIKFISETLRRMEEEERLAEQQRAEERERLAEVEAALEKQRQLAEAHAQAKAQAEREAKELQQRMQEEVVRREEAAVDAQQQKRSIQEELQQLRQSSEAEIQAKARQAEAAERSRLRIEEEIRVVRLQLEATERQRGGAEGELQALRARAEEAEAQKRQAQEEAERLRRQVQDESQRKRQAEVELASRVKAEAEAAREKQRALQALEELRLQAEEAERRLRQAEVERARQVQVALETAQRSAEAELQSKRASFAEKTAQLERSLQEEHVAVAQLREEAERRAQQQAEAERAREEAERELERWQLKANEALRLRLQAEEVAQQKSLAQAEAEKQKEEAEREARRRGKAEEQAVRQRELAEQELEKQRQLAEGTAQQRLAAEQELIRLRAETEQGEQQRQLLEEELARLQREAAAATQKRQELEAELAKVRAEMEVLLASKARAEEESRSTSEKSKQRLEAEAGRFRELAEEAARLRALAEEAKRQRQLAEEDAARQRAEAERVLAEKLAAIGEATRLKTEAEIALKEKEAENERLRRLAEDEAFQRRRLEEQAAQHKADIEERLAQLRKASDSELERQKGLVEDTLRQRRQVEEEILALKASFEKAAAGKAELELELGRIRSNAEDTLRSKEQAELEAARQRQLAAEEERRRREAEERVQKSLAAEEEAARQRKAALEEVERLKAKVEEARRLRERAEQESARQLQLAQEAAQKRLQAEEKAHAFAVQQKEQELQQTLQQEQSVLDQLRGEAEAARRAAEEAEEARVQAEREAAQSRRQVEEAERLKQSAEEQAQARAQAQAAAEKLRKEAEQEAARRAQAEQAALRQKQAADAEMEKHKKFAEQTLRQKAQVEQELTTLRLQLEETDHQKNLLDEELQRLKAEATEAARQRSQVEEELFSVRVQMEELSKLKARIEAENRALILRDKDNTQRFLQEEAEKMKQVAEEAARLSVAAQEAARLRQLAEEDLAQQRALAEKMLKEKMQAVQEATRLKAEAELLQQQKELAQEQARRLQEDKEQMAQQLAEETQGFQRTLEAERQRQLEMSAEAERLKLRVAEMSRAQARAEEDAQRFRKQAEEIGEKLHRTELATQEKVTLVQTLEIQRQQSDHDAERLREAIAELEREKEKLQQEAKLLQLKSEEMQTVQQEQLLQETQALQQSFLSEKDSLLQRERFIEQEKAKLEQLFQDEVAKAQQLREEQQRQQQQMEQERQRLVASMEEARRRQHEAEEGVRRKQEELQQLEQQRRQQEELLAEENQRLREQLQLLEEQHRAALAHSEEVTASQVAATKTLPNGRDALDGPAAEAEPEHSFDGLRRKVSAQRLQEAGILSAEELQRLAQGHTTVDELARREDVRHYLQGRSSIAGLLLKATNEKLSVYAALQRQLLSPGTALILLEAQAASGFLLDPVRNRRLTVNEAVKEGVVGPELHHKLLSAERAVTGYKDPYTGQQISLFQAMQKGLIVREHGIRLLEAQIATGGVIDPVHSHRVPVDVAYRRGYFDEEMNRVLADPSDDTKGFFDPNTHENLTYLQLLERCVEDPETGLCLLPLTDKAAKGGELVYTDSEARDVFEKATVSAPFGKFQGKTVTIWEIINSEYFTAEQRRDLLRQFRTGRITVEKIIKIIITVVEEQEQKGRLCFEGLRSLVPAAELLESRVIDRELYQQLQRGERSVRDVAEVDTVRRALRGANVIAGVWLEEAGQKLSIYNALKKDLLPSDMAVALLEAQAGTGHIIDPATSARLTVDEAVRAGLVGPEFHEKLLSAEKAVTGYRDPYTGQSVSLFQALKKGLIPREQGLRLLDAQLSTGGIVDPSKSHRVPLDVACARGCLDEETSRALSAPRADAKAYSDPSTGEPATYGELQQRCRPDQLTGLSLLPLSEKAARARQEELYSELQARETFEKTPVEVPVGGFKGRTVTVWELISSEYFTAEQRQELLRQFRTGKVTVEKVIKILITIVEEVETLRQERLSFSGLRAPVPASELLASGVLSRAQFEQLKDGKTTVKDLSELGSVRTLLQGSGCLAGIYLEDTKEKVSIYEAMRRGLLRATTAALLLEAQAATGFLVDPVRNQRLYVHEAVKAGVVGPELHEQLLSAEKAVTGYRDPYSGSTISLFQAMQKGLVLRQHGIRLLEAQIATGGIIDPVHSHRVPVDVAYQRGYFSEEMNRVLADPSDDTKGFFDPNTHENLTYRQLLERCVEDPETGLRLLPLKGAEKAEVVETTQVYTEEETRRAFEETQIDIPGGGSHGGSTMSLWEVMQSDLIPEEQRAQLMADFQAGRVTKERMIIIIIEIIEKTEIIRQQGLASYDYVRRRLTAEDLFEARIISLETYNLLREGTRSLREALEAESAWCYLYGTGSVAGVYLPGSRQTLSIYQALKKGLLSAEVARLLLEAQAATGFLLDPVKGERLTVDEAVRKGLVGPELHDRLLSAERAVTGYRDPYTEQTISLFQAMKKELIPTEEALRLLDAQLATGGIVDPRLGFHLPLEVAYQRGYLNKDTHDQLSEPSEVRSYVDPSTDERLSYTQLLRRCRRDDGTGQLLLPLSDARKLTFRGLRKQITMEELVRSQVMDEATALQLREGLTSIEEVTKNLQKFLEGTSCIAGVFVDATKERLSVYQAMKKGIIRPGTAFELLEAQAATGYVIDPIKGLKLTVEEAVRMGIVGPEFKDKLLSAERAVTGYKDPYSGKLISLFQAMKKGLILKDHGIRLLEAQIATGGIIDPEESHRLPVEVAYKRGLFDEEMNEILTDPSDDTKGFFDPNTEENLTYLQLMERCITDPQTGLCLLPLKEKKRERKTSSKSSVRKRRVVIVDPETGKEMSVYEAYRKGLIDHQTYLELSEQECEWEEITISSSDGVVKSMIIDRRSGRQYDIDDAIAKNLIDRSALDQYRAGTLSITEFADMLSGNAGGFRSRSSSVGSSSSYPISPAVSRTQLASWSDPTEETGPVAGILDTETLEKVSITEAMHRNLVDNITGQRLLEAQACTGGIIDPSTGERFPVTDAVNKGLVDKIMVDRINLAQKAFCGFEDPRTKTKMSAAQALKKGWLYYEAGQRFLEVQYLTGGLIEPDTPGRVPLDEALQRGTVDARTAQKLRDVGAYSKYLTCPKTKLKISYKDALDRSMVEEGTGLRLLEAAAQSTKGYYSPYSVSGSGSTAGSRTGSRTGSRAGSRRGSFDATGSGFSMTFSSSSYSSSGYGRRYASGSSASLGGPESAVA

SEQ ID NO: 69 - protein, 4570 aa, Homo sapiens
MSGEDAEVRAVSEDVSNGSSGSPSPGDTLPWNLGKTQRSRRSGGGAGSNGSVLDPAERAVIRIADERDRVQKKTFTKWVNKHLIKAQRHISDLYEDLRDGHNLISLLEVLSGDSLPREKGRMRFHKLQNVQIALDYLRHRQVKLVNIRNDDIADGNPKLTLGLIWTIILHFQISDIQVSGQSEDMTAKEKLLLWSQRMVEGYQGLRCDNFTSSWRDGRLFNAIIHRHKPLLIDMNKVYRQTNLENLDQAFSVAERDLGVTRLLDPEDVDVPQPDEKSIITYVSSLYDAMPRVPDVQDGELQLRWQEYRELVLLLLQWMRHHTAAFEERRFPSSFEEIEILWSQFLKFKEMELPAKEADKNRSKGIYQSLEGAVQAGQLKVPPGYHPLDVEKEWGKLHVAILEREKQLRSEFERLECLQRIVTKLQMEAGLCEEQLNQADALLQSDVRLLAAGKVPQRAGEVERDLDKADSMIRLLFNDVQTLKDGRHPQGEQMYRRVYRLHERLVAIRTEYNLRLKAGVAAPATQVAQVTLQSVQRRPELEDSTLRYLQDLLAWVEENQHRVDGAEWGVDLPSVEAQLGSHRGLHQSIEEFRAKIERARSDEGQLSPATRGAYRDCLGRLDLQYAKLLNSSKARLRSLESLHSFVAAATKELMWLNEKEEEEVGFDWSDRNTNMTAKKESYSALMRELELKEKKIKELQNAGDRLLREDHPARPTVESFQAALQTQWSWMLQLCCCIEAHLKENAAYFQFFSDVREAEGQLQKLQEALRRKYSCDRSATVTRLEDLLQDAQDEKEQLNEYKGHLSGLAKRAKAVVQLKPRHPAHPMRGRLPLLAVCDYKQVEVTVHKGDECQLVGPAQPSHWKVLSSSGSEAAVPSVCFLVPPPNQEAQEAVTRLEAQHQALVTLWHQLHVDMKSLLAWQSLRRDVQLIRSWSLATFRTLKPEEQRQALHSLELHYQAFLRDSQDAGGFGPEDRLMAEREYGSCSHHYQQLLQSLEQGAQEESRCQRCISELKDIRLQLEACETRTVHRLRLPLDKEPARECAQRIAEQQKAQAEVEGLGKGVARLSAEAEKVLALPEPSPAAPTLRSELELTLGKLEQVRSLSAIYLEKLKTISLVIRGTQGAEEVLRAHEEQLKEAQAVPATLPELEATKASLKKLRAQAEAQQPTFDALRDELRGAQEVGERLQQRHGERDVEVERWRERVAQLLERWQAVLAQTDVRQRELEQLGRQLRYYRESADPLGAWLQDARRRQEQIQAMPLADSQAVREQLRQEQALLEEIERHGEKVEECQRFAKQYINAIKDYELQLVTYKAQLEPVASPAKKPKVQSGSESVIQEYVDLRTHYSELTTLTSQYIKFISETLRRMEEEERLAEQQRAEERERLAEVEAALEKQRQLAEAHAQAKAQAEREAKELQQRMQEEVVRREEAAVDAQQQKRSIQEELQQLRQSSEAEIQAKARQAEAAERSRLRIEEEIRVVRLQLEATERQRGGAEGELQALRARAEEAEAQKRQAQEEAERLRRQVQDESQRKRQAEVELASRVKAEAEAAREKQRALQALEELRLQAEEAERRLRQAEVERARQVQVALETAQRSAEAELQSKRASFAEKTAQLERSLQEEHVAVAQLREEAERRAQQQAEAERAREEAERELERWQLKANEALRLRLQAEEVAQQKSLAQAEAEKQKEEAEREARRRGKAEEQAVRQRELAEQELEKQRQLAEGTAQQRLAAEQELIRLRAETEQGEQQRQLLEEELARLQREAAAATQKRQELEAELAKVRAEMEVLLASKARAEEESRSTSEKSKQRLEAEAGRFRELAEEAARLRALAEEAKRQRQLAEEDAARQRAEAERVLAEKLAAIGEATRLKTEAEIALKEKEAENERLRRLAEDEAFQRRRLEEQAAQHKADIEERLAQLRKASDSELERQKGLVEDTLRQRRQVEEEILALKASFEKAAAGKAELELELGRIRSNAEDTLRSKEQAELEAARQRQLAAEEERRRREAEERVQKSLAAEEEAARQRKAALEEVERLKAKVEEARRLRERAEQESARQLQLAQEAAQKRLQAEEKAHAFAVQQKEQELQQTLQQEQSVLDQLRGEAEAARRAAEEAEEARVQAEREAAQSRRQVEEAERLKQSAEEQAQARAQAQAAAEKLRKEAEQEAARRAQAEQAALRQKQAADAEMEKHKKFAEQTLRQKAQVEQELTTLRLQLEETDHQKNLLDEELQRLKAEATEAARQRSQVEEELFSVRVQMEELSKLKARIEAENRALILRDKDNTQRFLQEEAEKMKQVAEEAARLSVAAQEAARLRQLAEEDLAQQRALAEKMLKEKMQAVQEATRLKAEAELLQQQKELAQEQARRLQEDKEQMAQQLAEETQGFQRTLEAERQRQLEMSAEAERLKLRVAEMSRAQARAEEDAQRFRKQAEEIGEKLHRTELATQEKVTLVQTLEIQRQQSDHDAERLREAIAELEREKEKLQQEAKLLQLKSEEMQTVQQEQLLQETQALQQSFLSEKDSLLQRERFIEQEKAKLEQLFQDEVAKAQQLREEQQRQQQQMEQERQRLVASMEEARRRQHEAEEGVRRKQEELQQLEQQRRQQEELLAEENQRLREQLQLLEEQHRAALAHSEEVTASQVAATKTLPNGRDALDGPAAEAEPEHSFDGLRRKVSAQRLQEAGILSAEELQRLAQGHTTVDELARREDVRHYLQGRSSIAGLLLKATNEKLSVYAALQRQLLSPGTALILLEAQAASGFLLDPVRNRRLTVNEAVKEGVVGPELHHKLLSAERAVTGYKDPYTGQQISLFQAMQKGLIVREHGIRLLEAQIATGGVIDPVHSHRVPVDVAYRRGYFDEEMNRVLADPSDDTKGFFDPNTHENLTYLQLLERCVEDPETGLCLLPLTDKAAKGGELVYTDSEARDVFEKATVSAPFGKFQGKTVTIWEIINSEYFTAEQRRDLLRQFRTGRITVEKIIKIIITVVEEQEQKGRLCFEGLRSLVPAAELLESRVIDRELYQQLQRGERSVRDVAEVDTVRRALRGANVIAGVWLEEAGQKLSIYNALKKDLLPSDMAVALLEAQAGTGHIIDPATSARLTVDEAVRAGLVGPEFHEKLLSAEKAVTGYRDPYTGQSVSLFQALKKGLIPREQGLRLLDAQLSTGGIVDPSKSHRVPLDVACARGCLDEETSRALSAPRADAKAYSDPSTGEPATYGELQQRCRPDQLTGLSLLPLSEKAARARQEELYSELQARETFEKTPVEVPVGGFKGRTVTVWELISSEYFTAEQRQELLRQFRTGKVTVEKVIKILITIVEEVETLRQERLSFSGLRAPVPASELLASGVLSRAQFEQLKDGKTTVKDLSELGSVRTLLQGSGCLAGIYLEDTKEKVSIYEAMRRGLLRATTAALLLEAQAATGFLVDPVRNQRLYVHEAVKAGVVGPELHEQLLSAEKAVTGYRDPYSGSTISLFQAMQKGLVLRQHGIRLLEAQIATGGIIDPVHSHRVPVDVAYQRGYFSEEMNRVLADPSDDTKGFFDPNTHENLTYRQLLERCVEDPETGLRLLPLKGAEKAEVVETTQVYTEEETRRAFEETQIDIPGGGSHGGSTMSLWEVMQSDLIPEEQRAQLMADFQAGRVTKERMIIIIIEIIEKTEIIRQQGLASYDYVRRRLTAEDLFEARIISLETYNLLREGTRSLREALEAESAWCYLYGTGSVAGVYLPGSRQTLSIYQALKKGLLSAEVARLLLEAQAATGFLLDPVKGERLTVDEAVRKGLVGPELHDRLLSAERAVTGYRDPYTEQTISLFQAMKKELIPTEEALRLLDAQLATGGIVDPRLGFHLPLEVAYQRGYLNKDTHDQLSEPSEVRSYVDPSTDERLSYTQLLRRCRRDDGTGQLLLPLSDARKLTFRGLRKQITMEELVRSQVMDEATALQLREGLTSIEEVTKNLQKFLEGTSCIAGVFVDATKERLSVYQAMKKGIIRPGTAFELLEAQAATGYVIDPIKGLKLTVEEAVRMGIVGPEFKDKLLSAERAVTGYKDPYSGKLISLFQAMKKGLILKDHGIRLLEAQIATGGIIDPEESHRLPVEVAYKRGLFDEEMNEILTDPSDDTKGFFDPNTEENLTYLQLMERCITDPQTGLCLLPLKEKKRERKTSSKSSVRKRRVVIVDPETGKEMSVYEAYRKGLIDHQTYLELSEQECEWEEITISSSDGVVKSMIIDRRSGRQYDIDDAIAKNLIDRSALDQYRAGTLSITEFADMLSGNAGGFRSRSSSVGSSSSYPISPAVSRTQLASWSDPTEETGPVAGILDTETLEKVSITEAMHRNLVDNITGQRLLEAQACTGGIIDPSTGERFPVTDAVNKGLVDKIMVDRINLAQKAFCGFEDPRTKTKMSAAQALKKGWLYYEAGQRFLEVQYLTGGLIEPDTPGRVPLDEALQRGTVDARTAQKLRDVGAYSKYLTCPKTKLKISYKDALDRSMVEEGTGLRLLEAAAQSTKGYYSPYSVSGSGSTAGSRTGSRTGSRAGSRRGSFDATGSGFSMTFSSSSYSSSGYGRRYASGSSASLGGPESAVA

SEQ ID NO: 70 - protein, 4547 aa, Homo sapiens
MSQHQLRVPQPEGLGRKRTSSEDNLYLAVLRASEGKKDERDRVQKKTFTKWVNKHLIKAQRHISDLYEDLRDGHNLISLLEVLSGDSLPREKGRMRFHKLQNVQIALDYLRHRQVKLVNIRNDDIADGNPKLTLGLIWTIILHFQISDIQVSGQSEDMTAKEKLLLWSQRMVEGYQGLRCDNFTSSWRDGRLFNAIIHRHKPLLIDMNKVYRQTNLENLDQAFSVAERDLGVTRLLDPEDVDVPQPDEKSIITYVSSLYDAMPRVPDVQDGVRANELQLRWQEYRELVLLLLQWMRHHTAAFEERRFPSSFEEIEILWSQFLKFKEMELPAKEADKNRSKGIYQSLEGAVQAGQLKVPPGYHPLDVEKEWGKLHVAILEREKQLRSEFERLECLQRIVTKLQMEAGLCEEQLNQADALLQSDVRLLAAGKVPQRAGEVERDLDKADSMIRLLFNDVQTLKDGRHPQGEQMYRRVYRLHERLVAIRTEYNLRLKAGVAAPATQVAQVTLQSVQRRPELEDSTLRYLQDLLAWVEENQHRVDGAEWGVDLPSVEAQLGSHRGLHQSIEEFRAKIERARSDEGQLSPATRGAYRDCLGRLDLQYAKLLNSSKARLRSLESLHSFVAAATKELMWLNEKEEEEVGFDWSDRNTNMTAKKESYSALMRELELKEKKIKELQNAGDRLLREDHPARPTVESFQAALQTQWSWMLQLCCCIEAHLKENAAYFQFFSDVREAEGQLQKLQEALRRKYSCDRSATVTRLEDLLQDAQDEKEQLNEYKGHLSGLAKRAKAVVQLKPRHPAHPMRGRLPLLAVCDYKQVEVTVHKGDECQLVGPAQPSHWKVLSSSGSEAAVPSVCFLVPPPNQEAQEAVTRLEAQHQALVTLWHQLHVDMKSLLAWQSLRRDVQLIRSWSLATFRTLKPEEQRQALHSLELHYQAFLRDSQDAGGFGPEDRLMAEREYGSCSHHYQQLLQSLEQGAQEESRCQRCISELKDIRLQLEACETRTVHRLRLPLDKEPARECAQRIAEQQKAQAEVEGLGKGVARLSAEAEKVLALPEPSPAAPTLRSELELTLGKLEQVRSLSAIYLEKLKTISLVIRGTQGAEEVLRAHEEQLKEAQAVPATLPELEATKASLKKLRAQAEAQQPTFDALRDELRGAQEVGERLQQRHGERDVEVERWRERVAQLLERWQAVLAQTDVRQRELEQLGRQLRYYRESADPLGAWLQDARRRQEQIQAMPLADSQAVREQLRQEQALLEEIERHGEKVEECQRFAKQYINAIKDYELQLVTYKAQLEPVASPAKKPKVQSGSESVIQEYVDLRTHYSELTTLTSQYIKFISETLRRMEEEERLAEQQRAEERERLAEVEAALEKQRQLAEAHAQAKAQAEREAKELQQRMQEEVVRREEAAVDAQQQKRSIQEELQQLRQSSEAEIQAKARQAEAAERSRLRIEEEIRVVRLQLEATERQRGGAEGELQALRARAEEAEAQKRQAQEEAERLRRQVQDESQRKRQAEVELASRVKAEAEAAREKQRALQALEELRLQAEEAERRLRQAEVERARQVQVALETAQRSAEAELQSKRASFAEKTAQLERSLQEEHVAVAQLREEAERRAQQQAEAERAREEAERELERWQLKANEALRLRLQAEEVAQQKSLAQAEAEKQKEEAEREARRRGKAEEQAVRQRELAEQELEKQRQLAEGTAQQRLAAEQELIRLRAETEQGEQQRQLLEEELARLQREAAAATQKRQELEAELAKVRAEMEVLLASKARAEEESRSTSEKSKQRLEAEAGRFRELAEEAARLRALAEEAKRQRQLAEEDAARQRAEAERVLAEKLAAIGEATRLKTEAEIALKEKEAENERLRRLAEDEAFQRRRLEEQAAQHKADIEERLAQLRKASDSELERQKGLVEDTLRQRRQVEEEILALKASFEKAAAGKAELELELGRIRSNAEDTLRSKEQAELEAARQRQLAAEEERRRREAEERVQKSLAAEEEAARQRKAALEEVERLKAKVEEARRLRERAEQESARQLQLAQEAAQKRLQAEEKAHAFAVQQKEQELQQTLQQEQSVLDQLRGEAEAARRAAEEAEEARVQAEREAAQSRRQVEEAERLKQSAEEQAQARAQAQAAAEKLRKEAEQEAARRAQAEQAALRQKQAADAEMEKHKKFAEQTLRQKAQVEQELTTLRLQLEETDHQKNLLDEELQRLKAEATEAARQRSQVEEELFSVRVQMEELSKLKARIEAENRALILRDKDNTQRFLQEEAEKMKQVAEEAARLSVAAQEAARLRQLAEEDLAQQRALAEKMLKEKMQAVQEATRLKAEAELLQQQKELAQEQARRLQEDKEQMAQQLAEETQGFQRTLEAERQRQLEMSAEAERLKLRVAEMSRAQARAEEDAQRFRKQAEEIGEKLHRTELATQEKVTLVQTLEIQRQQSDHDAERLREAIAELEREKEKLQQEAKLLQLKSEEMQTVQQEQLLQETQALQQSFLSEKDSLLQRERFIEQEKAKLEQLFQDEVAKAQQLREEQQRQQQQMEQERQRLVASMEEARRRQHEAEEGVRRKQEELQQLEQQRRQQEELLAEENQRLREQLQLLEEQHRAALAHSEEVTASQVAATKTLPNGRDALDGPAAEAEPEHSFDGLRRKVSAQRLQEAGILSAEELQRLAQGHTTVDELARREDVRHYLQGRSSIAGLLLKATNEKLSVYAALQRQLLSPGTALILLEAQAASGFLLDPVRNRRLTVNEAVKEGVVGPELHHKLLSAERAVTGYKDPYTGQQISLFQAMQKGLIVREHGIRLLEAQIATGGVIDPVHSHRVPVDVAYRRGYFDEEMNRVLADPSDDTKGFFDPNTHENLTYLQLLERCVEDPETGLCLLPLTDKAAKGGELVYTDSEARDVFEKATVSAPFGKFQGKTVTIWEIINSEYFTAEQRRDLLRQFRTGRITVEKIIKIIITVVEEQEQKGRLCFEGLRSLVPAAELLESRVIDRELYQQLQRGERSVRDVAEVDTVRRALRGANVIAGVWLEEAGQKLSIYNALKKDLLPSDMAVALLEAQAGTGHIIDPATSARLTVDEAVRAGLVGPEFHEKLLSAEKAVTGYRDPYTGQSVSLFQALKKGLIPREQGLRLLDAQLSTGGIVDPSKSHRVPLDVACARGCLDEETSRALSAPRADAKAYSDPSTGEPATYGELQQRCRPDQLTGLSLLPLSEKAARARQEELYSELQARETFEKTPVEVPVGGFKGRTVTVWELISSEYFTAEQRQELLRQFRTGKVTVEKVIKILITIVEEVETLRQERLSFSGLRAPVPASELLASGVLSRAQFEQLKDGKTTVKDLSELGSVRTLLQGSGCLAGIYLEDTKEKVSIYEAMRRGLLRATTAALLLEAQAATGFLVDPVRNQRLYVHEAVKAGVVGPELHEQLLSAEKAVTGYRDPYSGSTISLFQAMQKGLVLRQHGIRLLEAQIATGGIIDPVHSHRVPVDVAYQRGYFSEEMNRVLADPSDDTKGFFDPNTHENLTYRQLLERCVEDPETGLRLLPLKGAEKAEVVETTQVYTEEETRRAFEETQIDIPGGGSHGGSTMSLWEVMQSDLIPEEQRAQLMADFQAGRVTKERMIIIIIEIIEKTEIIRQQGLASYDYVRRRLTAEDLFEARIISLETYNLLREGTRSLREALEAESAWCYLYGTGSVAGVYLPGSRQTLSIYQALKKGLLSAEVARLLLEAQAATGFLLDPVKGERLTVDEAVRKGLVGPELHDRLLSAERAVTGYRDPYTEQTISLFQAMKKELIPTEEALRLLDAQLATGGIVDPRLGFHLPLEVAYQRGYLNKDTHDQLSEPSEVRSYVDPSTDERLSYTQLLRRCRRDDGTGQLLLPLSDARKLTFRGLRKQITMEELVRSQVMDEATALQLREGLTSIEEVTKNLQKFLEGTSCIAGVFVDATKERLSVYQAMKKGIIRPGTAFELLEAQAATGYVIDPIKGLKLTVEEAVRMGIVGPEFKDKLLSAERAVTGYKDPYSGKLISLFQAMKKGLILKDHGIRLLEAQIATGGIIDPEESHRLPVEVAYKRGLFDEEMNEILTDPSDDTKGFFDPNTEENLTYLQLMERCITDPQTGLCLLPLKEKKRERKTSSKSSVRKRRVVIVDPETGKEMSVYEAYRKGLIDHQTYLELSEQECEWEEITISSSDGVVKSMIIDRRSGRQYDIDDAIAKNLIDRSALDQYRAGTLSITEFADMLSGNAGGFRSRSSSVGSSSSYPISPAVSRTQLASWSDPTEETGPVAGILDTETLEKVSITEAMHRNLVDNITGQRLLEAQACTGGIIDPSTGERFPVTDAVNKGLVDKIMVDRINLAQKAFCGFEDPRTKTKMSAAQALKKGWLYYEAGQRFLEVQYLTGGLIEPDTPGRVPLDEALQRGTVDARTAQKLRDVGAYSKYLTCPKTKLKISYKDALDRSMVEEGTGLRLLEAAAQSTKGYYSPYSVSGSGSTAGSRTGSRTGSRAGSRRGSFDATGSGFSMTFSSSSYSSSGYGRRYASGSSASLGGPESAVA

SEQ ID NO: 71 - protein, 4547 aa, Homo sapiens
MEPSGSLFPSLVVVGHVVTLAAVWHWRRGRRWAQDEQDERDRVQKKTFTKWVNKHLIKAQRHISDLYEDLRDGHNLISLLEVLSGDSLPREKGRMRFHKLQNVQIALDYLRHRQVKLVNIRNDDIADGNPKLTLGLIWTIILHFQISDIQVSGQSEDMTAKEKLLLWSQRMVEGYQGLRCDNFTSSWRDGRLFNAIIHRHKPLLIDMNKVYRQTNLENLDQAFSVAERDLGVTRLLDPEDVDVPQPDEKSIITYVSSLYDAMPRVPDVQDGVRANELQLRWQEYRELVLLLLQWMRHHTAAFEERRFPSSFEEIEILWSQFLKFKEMELPAKEADKNRSKGIYQSLEGAVQAGQLKVPPGYHPLDVEKEWGKLHVAILEREKQLRSEFERLECLQRIVTKLQMEAGLCEEQLNQADALLQSDVRLLAAGKVPQRAGEVERDLDKADSMIRLLFNDVQTLKDGRHPQGEQMYRRVYRLHERLVAIRTEYNLRLKAGVAAPATQVAQVTLQSVQRRPELEDSTLRYLQDLLAWVEENQHRVDGAEWGVDLPSVEAQLGSHRGLHQSIEEFRAKIERARSDEGQLSPATRGAYRDCLGRLDLQYAKLLNSSKARLRSLESLHSFVAAATKELMWLNEKEEEEVGFDWSDRNTNMTAKKESYSALMRELELKEKKIKELQNAGDRLLREDHPARPTVESFQAALQTQWSWMLQLCCCIEAHLKENAAYFQFFSDVREAEGQLQKLQEALRRKYSCDRSATVTRLEDLLQDAQDEKEQLNEYKGHLSGLAKRAKAVVQLKPRHPAHPMRGRLPLLAVCDYKQVEVTVHKGDECQLVGPAQPSHWKVLSSSGSEAAVPSVCFLVPPPNQEAQEAVTRLEAQHQALVTLWHQLHVDMKSLLAWQSLRRDVQLIRSWSLATFRTLKPEEQRQALHSLELHYQAFLRDSQDAGGFGPEDRLMAEREYGSCSHHYQQLLQSLEQGAQEESRCQRCISELKDIRLQLEACETRTVHRLRLPLDKEPARECAQRIAEQQKAQAEVEGLGKGVARLSAEAEKVLALPEPSPAAPTLRSELELTLGKLEQVRSLSAIYLEKLKTISLVIRGTQGAEEVLRAHEEQLKEAQAVPATLPELEATKASLKKLRAQAEAQQPTFDALRDELRGAQEVGERLQQRHGERDVEVERWRERVAQLLERWQAVLAQTDVRQRELEQLGRQLRYYRESADPLGAWLQDARRRQEQIQAMPLADSQAVREQLRQEQALLEEIERHGEKVEECQRFAKQYINAIKDYELQLVTYKAQLEPVASPAKKPKVQSGSESVIQEYVDLRTHYSELTTLTSQYIKFISETLRRMEEEERLAEQQRAEERERLAEVEAALEKQRQLAEAHAQAKAQAEREAKELQQRMQEEVVRREEAAVDAQQQKRSIQEELQQLRQSSEAEIQAKARQAEAAERSRLRIEEEIRVVRLQLEATERQRGGAEGELQALRARAEEAEAQKRQAQEEAERLRRQVQDESQRKRQAEVELASRVKAEAEAAREKQRALQALEELRLQAEEAERRLRQAEVERARQVQVALETAQRSAEAELQSKRASFAEKTAQLERSLQEEHVAVAQLREEAERRAQQQAEAERAREEAERELERWQLKANEALRLRLQAEEVAQQKSLAQAEAEKQKEEAEREARRRGKAEEQAVRQRELAEQELEKQRQLAEGTAQQRLAAEQELIRLRAETEQGEQQRQLLEEELARLQREAAAATQKRQELEAELAKVRAEMEVLLASKARAEEESRSTSEKSKQRLEAEAGRFRELAEEAARLRALAEEAKRQRQLAEEDAARQRAEAERVLAEKLAAIGEATRLKTEAEIALKEKEAENERLRRLAEDEAFQRRRLEEQAAQHKADIEERLAQLRKASDSELERQKGLVEDTLRQRRQVEEEILALKASFEKAAAGKAELELELGRIRSNAEDTLRSKEQAELEAARQRQLAAEEERRRREAEERVQKSLAAEEEAARQRKAALEEVERLKAKVEEARRLRERAEQESARQLQLAQEAAQKRLQAEEKAHAFAVQQKEQELQQTLQQEQSVLDQLRGEAEAARRAAEEAEEARVQAEREAAQSRRQVEEAERLKQSAEEQAQARAQAQAAAEKLRKEAEQEAARRAQAEQAALRQKQAADAEMEKHKKFAEQTLRQKAQVEQELTTLRLQLEETDHQKNLLDEELQRLKAEATEAARQRSQVEEELFSVRVQMEELSKLKARIEAENRALILRDKDNTQRFLQEEAEKMKQVAEEAARLSVAAQEAARLRQLAEEDLAQQRALAEKMLKEKMQAVQEATRLKAEAELLQQQKELAQEQARRLQEDKEQMAQQLAEETQGFQRTLEAERQRQLEMSAEAERLKLRVAEMSRAQARAEEDAQRFRKQAEEIGEKLHRTELATQEKVTLVQTLEIQRQQSDHDAERLREAIAELEREKEKLQQEAKLLQLKSEEMQTVQQEQLLQETQALQQSFLSEKDSLLQRERFIEQEKAKLEQLFQDEVAKAQQLREEQQRQQQQMEQERQRLVASMEEARRRQHEAEEGVRRKQEELQQLEQQRRQQEELLAEENQRLREQLQLLEEQHRAALAHSEEVTASQVAATKTLPNGRDALDGPAAEAEPEHSFDGLRRKVSAQRLQEAGILSAEELQRLAQGHTTVDELARREDVRHYLQGRSSIAGLLLKATNEKLSVYAALQRQLLSPGTALILLEAQAASGFLLDPVRNRRLTVNEAVKEGVVGPELHHKLLSAERAVTGYKDPYTGQQISLFQAMQKGLIVREHGIRLLEAQIATGGVIDPVHSHRVPVDVAYRRGYFDEEMNRVLADPSDDTKGFFDPNTHENLTYLQLLERCVEDPETGLCLLPLTDKAAKGGELVYTDSEARDVFEKATVSAPFGKFQGKTVTIWEIINSEYFTAEQRRDLLRQFRTGRITVEKIIKIIITVVEEQEQKGRLCFEGLRSLVPAAELLESRVIDRELYQQLQRGERSVRDVAEVDTVRRALRGANVIAGVWLEEAGQKLSIYNALKKDLLPSDMAVALLEAQAGTGHIIDPATSARLTVDEAVRAGLVGPEFHEKLLSAEKAVTGYRDPYTGQSVSLFQALKKGLIPREQGLRLLDAQLSTGGIVDPSKSHRVPLDVACARGCLDEETSRALSAPRADAKAYSDPSTGEPATYGELQQRCRPDQLTGLSLLPLSEKAARARQEELYSELQARETFEKTPVEVPVGGFKGRTVTVWELISSEYFTAEQRQELLRQFRTGKVTVEKVIKILITIVEEVETLRQERLSFSGLRAPVPASELLASGVLSRAQFEQLKDGKTTVKDLSELGSVRTLLQGSGCLAGIYLEDTKEKVSIYEAMRRGLLRATTAALLLEAQAATGFLVDPVRNQRLYVHEAVKAGVVGPELHEQLLSAEKAVTGYRDPYSGSTISLFQAMQKGLVLRQHGIRLLEAQIATGGIIDPVHSHRVPVDVAYQRGYFSEEMNRVLADPSDDTKGFFDPNTHENLTYRQLLERCVEDPETGLRLLPLKGAEKAEVVETTQVYTEEETRRAFEETQIDIPGGGSHGGSTMSLWEVMQSDLIPEEQRAQLMADFQAGRVTKERMIIIIIEIIEKTEIIRQQGLASYDYVRRRLTAEDLFEARIISLETYNLLREGTRSLREALEAESAWCYLYGTGSVAGVYLPGSRQTLSIYQALKKGLLSAEVARLLLEAQAATGFLLDPVKGERLTVDEAVRKGLVGPELHDRLLSAERAVTGYRDPYTEQTISLFQAMKKELIPTEEALRLLDAQLATGGIVDPRLGFHLPLEVAYQRGYLNKDTHDQLSEPSEVRSYVDPSTDERLSYTQLLRRCRRDDGTGQLLLPLSDARKLTFRGLRKQITMEELVRSQVMDEATALQLREGLTSIEEVTKNLQKFLEGTSCIAGVFVDATKERLSVYQAMKKGIIRPGTAFELLEAQAATGYVIDPIKGLKLTVEEAVRMGIVGPEFKDKLLSAERAVTGYKDPYSGKLISLFQAMKKGLILKDHGIRLLEAQIATGGIIDPEESHRLPVEVAYKRGLFDEEMNEILTDPSDDTKGFFDPNTEENLTYLQLMERCITDPQTGLCLLPLKEKKRERKTSSKSSVRKRRVVIVDPETGKEMSVYEAYRKGLIDHQTYLELSEQECEWEEITISSSDGVVKSMIIDRRSGRQYDIDDAIAKNLIDRSALDQYRAGTLSITEFADMLSGNAGGFRSRSSSVGSSSSYPISPAVSRTQLASWSDPTEETGPVAGILDTETLEKVSITEAMHRNLVDNITGQRLLEAQACTGGIIDPSTGERFPVTDAVNKGLVDKIMVDRINLAQKAFCGFEDPRTKTKMSAAQALKKGWLYYEAGQRFLEVQYLTGGLIEPDTPGRVPLDEALQRGTVDARTAQKLRDVGAYSKYLTCPKTKLKISYKDALDRSMVEEGTGLRLLEAAAQSTKGYYSPYSVSGSGSTAGSRTGSRTGSRAGSRRGSFDATGSGFSMTFSSSSYSSSGYGRRYASGSSASLGGPESAVA

SEQ ID NO: 72 - protein, 4551 aa, Homo sapiens
MSGAGGAFASPREVLLERPCWLDGGCEPARRGYLYQQLCCVDERDRVQKKTFTKWVNKHLIKAQRHISDLYEDLRDGHNLISLLEVLSGDSLPREKGRMRFHKLQNVQIALDYLRHRQVKLVNIRNDDIADGNPKLTLGLIWTIILHFQISDIQVSGQSEDMTAKEKLLLWSQRMVEGYQGLRCDNFTSSWRDGRLFNAIIHRHKPLLIDMNKVYRQTNLENLDQAFSVAERDLGVTRLLDPEDVDVPQPDEKSIITYVSSLYDAMPRVPDVQDGVRANELQLRWQEYRELVLLLLQWMRHHTAAFEERRFPSSFEEIEILWSQFLKFKEMELPAKEADKNRSKGIYQSLEGAVQAGQLKVPPGYHPLDVEKEWGKLHVAILEREKQLRSEFERLECLQRIVTKLQMEAGLCEEQLNQADALLQSDVRLLAAGKVPQRAGEVERDLDKADSMIRLLFNDVQTLKDGRHPQGEQMYRRVYRLHERLVAIRTEYNLRLKAGVAAPATQVAQVTLQSVQRRPELEDSTLRYLQDLLAWVEENQHRVDGAEWGVDLPSVEAQLGSHRGLHQSIEEFRAKIERARSDEGQLSPATRGAYRDCLGRLDLQYAKLLNSSKARLRSLESLHSFVAAATKELMWLNEKEEEEVGFDWSDRNTNMTAKKESYSALMRELELKEKKIKELQNAGDRLLREDHPARPTVESFQAALQTQWSWMLQLCCCIEAHLKENAAYFQFFSDVREAEGQLQKLQEALRRKYSCDRSATVTRLEDLLQDAQDEKEQLNEYKGHLSGLAKRAKAVVQLKPRHPAHPMRGRLPLLAVCDYKQVEVTVHKGDECQLVGPAQPSHWKVLSSSGSEAAVPSVCFLVPPPNQEAQEAVTRLEAQHQALVTLWHQLHVDMKSLLAWQSLRRDVQLIRSWSLATFRTLKPEEQRQALHSLELHYQAFLRDSQDAGGFGPEDRLMAEREYGSCSHHYQQLLQSLEQGAQEESRCQRCISELKDIRLQLEACETRTVHRLRLPLDKEPARECAQRIAEQQKAQAEVEGLGKGVARLSAEAEKVLALPEPSPAAPTLRSELELTLGKLEQVRSLSAIYLEKLKTISLVIRGTQGAEEVLRAHEEQLKEAQAVPATLPELEATKASLKKLRAQAEAQQPTFDALRDELRGAQEVGERLQQRHGERDVEVERWRERVAQLLERWQAVLAQTDVRQRELEQLGRQLRYYRESADPLGAWLQDARRRQEQIQAMPLADSQAVREQLRQEQALLEEIERHGEKVEECQRFAKQYINAIKDYELQLVTYKAQLEPVASPAKKPKVQSGSESVIQEYVDLRTHYSELTTLTSQYIKFISETLRRMEEEERLAEQQRAEERERLAEVEAALEKQRQLAEAHAQAKAQAEREAKELQQRMQEEVVRREEAAVDAQQQKRSIQEELQQLRQSSEAEIQAKARQAEAAERSRLRIEEEIRVVRLQLEATERQRGGAEGELQALRARAEEAEAQKRQAQEEAERLRRQVQDESQRKRQAEVELASRVKAEAEAAREKQRALQALEELRLQAEEAERRLRQAEVERARQVQVALETAQRSAEAELQSKRASFAEKTAQLERSLQEEHVAVAQLREEAERRAQQQAEAERAREEAERELERWQLKANEALRLRLQAEEVAQQKSLAQAEAEKQKEEAEREARRRGKAEEQAVRQRELAEQELEKQRQLAEGTAQQRLAAEQELIRLRAETEQGEQQRQLLEEELARLQREAAAATQKRQELEAELAKVRAEMEVLLASKARAEEESRSTSEKSKQRLEAEAGRFRELAEEAARLRALAEEAKRQRQLAEEDAARQRAEAERVLAEKLAAIGEATRLKTEAEIALKEKEAENERLRRLAEDEAFQRRRLEEQAAQHKADIEERLAQLRKASDSELERQKGLVEDTLRQRRQVEEEILALKASFEKAAAGKAELELELGRIRSNAEDTLRSKEQAELEAARQRQLAAEEERRRREAEERVQKSLAAEEEAARQRKAALEEVERLKAKVEEARRLRERAEQESARQLQLAQEAAQKRLQAEEKAHAFAVQQKEQELQQTLQQEQSVLDQLRGEAEAARRAAEEAEEARVQAEREAAQSRRQVEEAERLKQSAEEQAQARAQAQAAAEKLRKEAEQEAARRAQAEQAALRQKQAADAEMEKHKKFAEQTLRQKAQVEQELTTLRLQLEETDHQKNLLDEELQRLKAEATEAARQRSQVEEELFSVRVQMEELSKLKARIEAENRALILRDKDNTQRFLQEEAEKMKQVAEEAARLSVAAQEAARLRQLAEEDLAQQRALAEKMLKEKMQAVQEATRLKAEAELLQQQKELAQEQARRLQEDKEQMAQQLAEETQGFQRTLEAERQRQLEMSAEAERLKLRVAEMSRAQARAEEDAQRFRKQAEEIGEKLHRTELATQEKVTLVQTLEIQRQQSDHDAERLREAIAELEREKEKLQQEAKLLQLKSEEMQTVQQEQLLQETQALQQSFLSEKDSLLQRERFIEQEKAKLEQLFQDEVAKAQQLREEQQRQQQQMEQERQRLVASMEEARRRQHEAEEGVRRKQEELQQLEQQRRQQEELLAEENQRLREQLQLLEEQHRAALAHSEEVTASQVAATKTLPNGRDALDGPAAEAEPEHSFDGLRRKVSAQRLQEAGILSAEELQRLAQGHTTVDELARREDVRHYLQGRSSIAGLLLKATNEKLSVYAALQRQLLSPGTALILLEAQAASGFLLDPVRNRRLTVNEAVKEGVVGPELHHKLLSAERAVTGYKDPYTGQQISLFQAMQKGLIVREHGIRLLEAQIATGGVIDPVHSHRVPVDVAYRRGYFDEEMNRVLADPSDDTKGFFDPNTHENLTYLQLLERCVEDPETGLCLLPLTDKAAKGGELVYTDSEARDVFEKATVSAPFGKFQGKTVTIWEIINSEYFTAEQRRDLLRQFRTGRITVEKIIKIIITVVEEQEQKGRLCFEGLRSLVPAAELLESRVIDRELYQQLQRGERSVRDVAEVDTVRRALRGANVIAGVWLEEAGQKLSIYNALKKDLLPSDMAVALLEAQAGTGHIIDPATSARLTVDEAVRAGLVGPEFHEKLLSAEKAVTGYRDPYTGQSVSLFQALKKGLIPREQGLRLLDAQLSTGGIVDPSKSHRVPLDVACARGCLDEETSRALSAPRADAKAYSDPSTGEPATYGELQQRCRPDQLTGLSLLPLSEKAARARQEELYSELQARETFEKTPVEVPVGGFKGRTVTVWELISSEYFTAEQRQELLRQFRTGKVTVEKVIKILITIVEEVETLRQERLSFSGLRAPVPASELLASGVLSRAQFEQLKDGKTTVKDLSELGSVRTLLQGSGCLAGIYLEDTKEKVSIYEAMRRGLLRATTAALLLEAQAATGFLVDPVRNQRLYVHEAVKAGVVGPELHEQLLSAEKAVTGYRDPYSGSTISLFQAMQKGLVLRQHGIRLLEAQIATGGIIDPVHSHRVPVDVAYQRGYFSEEMNRVLADPSDDTKGFFDPNTHENLTYRQLLERCVEDPETGLRLLPLKGAEKAEVVETTQVYTEEETRRAFEETQIDIPGGGSHGGSTMSLWEVMQSDLIPEEQRAQLMADFQAGRVTKERMIIIIIEIIEKTEIIRQQGLASYDYVRRRLTAEDLFEARIISLETYNLLREGTRSLREALEAESAWCYLYGTGSVAGVYLPGSRQTLSIYQALKKGLLSAEVARLLLEAQAATGFLLDPVKGERLTVDEAVRKGLVGPELHDRLLSAERAVTGYRDPYTEQTISLFQAMKKELIPTEEALRLLDAQLATGGIVDPRLGFHLPLEVAYQRGYLNKDTHDQLSEPSEVRSYVDPSTDERLSYTQLLRRCRRDDGTGQLLLPLSDARKLTFRGLRKQITMEELVRSQVMDEATALQLREGLTSIEEVTKNLQKFLEGTSCIAGVFVDATKERLSVYQAMKKGIIRPGTAFELLEAQAATGYVIDPIKGLKLTVEEAVRMGIVGPEFKDKLLSAERAVTGYKDPYSGKLISLFQAMKKGLILKDHGIRLLEAQIATGGIIDPEESHRLPVEVAYKRGLFDEEMNEILTDPSDDTKGFFDPNTEENLTYLQLMERCITDPQTGLCLLPLKEKKRERKTSSKSSVRKRRVVIVDPETGKEMSVYEAYRKGLIDHQTYLELSEQECEWEEITISSSDGVVKSMIIDRRSGRQYDIDDAIAKNLIDRSALDQYRAGTLSITEFADMLSGNAGGFRSRSSSVGSSSSYPISPAVSRTQLASWSDPTEETGPVAGILDTETLEKVSITEAMHRNLVDNITGQRLLEAQACTGGIIDPSTGERFPVTDAVNKGLVDKIMVDRINLAQKAFCGFEDPRTKTKMSAAQALKKGWLYYEAGQRFLEVQYLTGGLIEPDTPGRVPLDEALQRGTVDARTAQKLRDVGAYSKYLTCPKTKLKISYKDALDRSMVEEGTGLRLLEAAAQSTKGYYSPYSVSGSGSTAGSRTGSRTGSRAGSRRGSFDATGSGFSMTFSSSSYSSSGYGRRYASGSSASLGGPESAVA

SEQ ID NO: 73 - protein, 4515 aa, Homo sapiens
MKIVPDERDRVQKKTFTKWVNKHLIKAQRHISDLYEDLRDGHNLISLLEVLSGDSLPREKGRMRFHKLQNVQIALDYLRHRQVKLVNIRNDDIADGNPKLTLGLIWTIILHFQISDIQVSGQSEDMTAKEKLLLWSQRMVEGYQGLRCDNFTSSWRDGRLFNAIIHRHKPLLIDMNKVYRQTNLENLDQAFSVAERDLGVTRLLDPEDVDVPQPDEKSIITYVSSLYDAMPRVPDVQDGVRANELQLRWQEYRELVLLLLQWMRHHTAAFEERRFPSSFEEIEILWSQFLKFKEMELPAKEADKNRSKGIYQSLEGAVQAGQLKVPPGYHPLDVEKEWGKLHVAILEREKQLRSEFERLECLQRIVTKLQMEAGLCEEQLNQADALLQSDVRLLAAGKVPQRAGEVERDLDKADSMIRLLFNDVQTLKDGRHPQGEQMYRRVYRLHERLVAIRTEYNLRLKAGVAAPATQVAQVTLQSVQRRPELEDSTLRYLQDLLAWVEENQHRVDGAEWGVDLPSVEAQLGSHRGLHQSIEEFRAKIERARSDEGQLSPATRGAYRDCLGRLDLQYAKLLNSSKARLRSLESLHSFVAAATKELMWLNEKEEEEVGFDWSDRNTNMTAKKESYSALMRELELKEKKIKELQNAGDRLLREDHPARPTVESFQAALQTQWSWMLQLCCCIEAHLKENAAYFQFFSDVREAEGQLQKLQEALRRKYSCDRSATVTRLEDLLQDAQDEKEQLNEYKGHLSGLAKRAKAVVQLKPRHPAHPMRGRLPLLAVCDYKQVEVTVHKGDECQLVGPAQPSHWKVLSSSGSEAAVPSVCFLVPPPNQEAQEAVTRLEAQHQALVTLWHQLHVDMKSLLAWQSLRRDVQLIRSWSLATFRTLKPEEQRQALHSLELHYQAFLRDSQDAGGFGPEDRLMAEREYGSCSHHYQQLLQSLEQGAQEESRCQRCISELKDIRLQLEACETRTVHRLRLPLDKEPARECAQRIAEQQKAQAEVEGLGKGVARLSAEAEKVLALPEPSPAAPTLRSELELTLGKLEQVRSLSAIYLEKLKTISLVIRGTQGAEEVLRAHEEQLKEAQAVPATLPELEATKASLKKLRAQAEAQQPTFDALRDELRGAQEVGERLQQRHGERDVEVERWRERVAQLLERWQAVLAQTDVRQRELEQLGRQLRYYRESADPLGAWLQDARRRQEQIQAMPLADSQAVREQLRQEQALLEEIERHGEKVEECQRFAKQYINAIKDYELQLVTYKAQLEPVASPAKKPKVQSGSESVIQEYVDLRTHYSELTTLTSQYIKFISETLRRMEEEERLAEQQRAEERERLAEVEAALEKQRQLAEAHAQAKAQAEREAKELQQRMQEEVVRREEAAVDAQQQKRSIQEELQQLRQSSEAEIQAKARQAEAAERSRLRIEEEIRVVRLQLEATERQRGGAEGELQALRARAEEAEAQKRQAQEEAERLRRQVQDESQRKRQAEVELASRVKAEAEAAREKQRALQALEELRLQAEEAERRLRQAEVERARQVQVALETAQRSAEAELQSKRASFAEKTAQLERSLQEEHVAVAQLREEAERRAQQQAEAERAREEAERELERWQLKANEALRLRLQAEEVAQQKSLAQAEAEKQKEEAEREARRRGKAEEQAVRQRELAEQELEKQRQLAEGTAQQRLAAEQELIRLRAETEQGEQQRQLLEEELARLQREAAAATQKRQELEAELAKVRAEMEVLLASKARAEEESRSTSEKSKQRLEAEAGRFRELAEEAARLRALAEEAKRQRQLAEEDAARQRAEAERVLAEKLAAIGEATRLKTEAEIALKEKEAENERLRRLAEDEAFQRRRLEEQAAQHKADIEERLAQLRKASDSELERQKGLVEDTLRQRRQVEEEILALKASFEKAAAGKAELELELGRIRSNAEDTLRSKEQAELEAARQRQLAAEEERRRREAEERVQKSLAAEEEAARQRKAALEEVERLKAKVEEARRLRERAEQESARQLQLAQEAAQKRLQAEEKAHAFAVQQKEQELQQTLQQEQSVLDQLRGEAEAARRAAEEAEEARVQAEREAAQSRRQVEEAERLKQSAEEQAQARAQAQAAAEKLRKEAEQEAARRAQAEQAALRQKQAADAEMEKHKKFAEQTLRQKAQVEQELTTLRLQLEETDHQKNLLDEELQRLKAEATEAARQRSQVEEELFSVRVQMEELSKLKARIEAENRALILRDKDNTQRFLQEEAEKMKQVAEEAARLSVAAQEAARLRQLAEEDLAQQRALAEKMLKEKMQAVQEATRLKAEAELLQQQKELAQEQARRLQEDKEQMAQQLAEETQGFQRTLEAERQRQLEMSAEAERLKLRVAEMSRAQARAEEDAQRFRKQAEEIGEKLHRTELATQEKVTLVQTLEIQRQQSDHDAERLREAIAELEREKEKLQQEAKLLQLKSEEMQTVQQEQLLQETQALQQSFLSEKDSLLQRERFIEQEKAKLEQLFQDEVAKAQQLREEQQRQQQQMEQERQRLVASMEEARRRQHEAEEGVRRKQEELQQLEQQRRQQEELLAEENQRLREQLQLLEEQHRAALAHSEEVTASQVAATKTLPNGRDALDGPAAEAEPEHSFDGLRRKVSAQRLQEAGILSAEELQRLAQGHTTVDELARREDVRHYLQGRSSIAGLLLKATNEKLSVYAALQRQLLSPGTALILLEAQAASGFLLDPVRNRRLTVNEAVKEGVVGPELHHKLLSAERAVTGYKDPYTGQQISLFQAMQKGLIVREHGIRLLEAQIATGGVIDPVHSHRVPVDVAYRRGYFDEEMNRVLADPSDDTKGFFDPNTHENLTYLQLLERCVEDPETGLCLLPLTDKAAKGGELVYTDSEARDVFEKATVSAPFGKFQGKTVTIWEIINSEYFTAEQRRDLLRQFRTGRITVEKIIKIIITVVEEQEQKGRLCFEGLRSLVPAAELLESRVIDRELYQQLQRGERSVRDVAEVDTVRRALRGANVIAGVWLEEAGQKLSIYNALKKDLLPSDMAVALLEAQAGTGHIIDPATSARLTVDEAVRAGLVGPEFHEKLLSAEKAVTGYRDPYTGQSVSLFQALKKGLIPREQGLRLLDAQLSTGGIVDPSKSHRVPLDVACARGCLDEETSRALSAPRADAKAYSDPSTGEPATYGELQQRCRPDQLTGLSLLPLSEKAARARQEELYSELQARETFEKTPVEVPVGGFKGRTVTVWELISSEYFTAEQRQELLRQFRTGKVTVEKVIKILITIVEEVETLRQERLSFSGLRAPVPASELLASGVLSRAQFEQLKDGKTTVKDLSELGSVRTLLQGSGCLAGIYLEDTKEKVSIYEAMRRGLLRATTAALLLEAQAATGFLVDPVRNQRLYVHEAVKAGVVGPELHEQLLSAEKAVTGYRDPYSGSTISLFQAMQKGLVLRQHGIRLLEAQIATGGIIDPVHSHRVPVDVAYQRGYFSEEMNRVLADPSDDTKGFFDPNTHENLTYRQLLERCVEDPETGLRLLPLKGAEKAEVVETTQVYTEEETRRAFEETQIDIPGGGSHGGSTMSLWEVMQSDLIPEEQRAQLMADFQAGRVTKERMIIIIIEIIEKTEIIRQQGLASYDYVRRRLTAEDLFEARIISLETYNLLREGTRSLREALEAESAWCYLYGTGSVAGVYLPGSRQTLSIYQALKKGLLSAEVARLLLEAQAATGFLLDPVKGERLTVDEAVRKGLVGPELHDRLLSAERAVTGYRDPYTEQTISLFQAMKKELIPTEEALRLLDAQLATGGIVDPRLGFHLPLEVAYQRGYLNKDTHDQLSEPSEVRSYVDPSTDERLSYTQLLRRCRRDDGTGQLLLPLSDARKLTFRGLRKQITMEELVRSQVMDEATALQLREGLTSIEEVTKNLQKFLEGTSCIAGVFVDATKERLSVYQAMKKGIIRPGTAFELLEAQAATGYVIDPIKGLKLTVEEAVRMGIVGPEFKDKLLSAERAVTGYKDPYSGKLISLFQAMKKGLILKDHGIRLLEAQIATGGIIDPEESHRLPVEVAYKRGLFDEEMNEILTDPSDDTKGFFDPNTEENLTYLQLMERCITDPQTGLCLLPLKEKKRERKTSSKSSVRKRRVVIVDPETGKEMSVYEAYRKGLIDHQTYLELSEQECEWEEITISSSDGVVKSMIIDRRSGRQYDIDDAIAKNLIDRSALDQYRAGTLSITEFADMLSGNAGGFRSRSSSVGSSSSYPISPAVSRTQLASWSDPTEETGPVAGILDTETLEKVSITEAMHRNLVDNITGQRLLEAQACTGGIIDPSTGERFPVTDAVNKGLVDKIMVDRINLAQKAFCGFEDPRTKTKMSAAQALKKGWLYYEAGQRFLEVQYLTGGLIEPDTPGRVPLDEALQRGTVDARTAQKLRDVGAYSKYLTCPKTKLKISYKDALDRSMVEEGTGLRLLEAAAQSTKGYYSPYSVSGSGSTAGSRTGSRTGSRAGSRRGSFDATGSGFSMTFSSSSYSSSGYGRRYASGSSASLGGPESAVA

SEQ ID NO: 74 - protein, 4525 aa, Homo sapiens
MDPSRAIQNEISSLKDERDRVQKKTFTKWVNKHLIKAQRHISDLYEDLRDGHNLISLLEVLSGDSLPREKGRMRFHKLQNVQIALDYLRHRQVKLVNIRNDDIADGNPKLTLGLIWTIILHFQISDIQVSGQSEDMTAKEKLLLWSQRMVEGYQGLRCDNFTSSWRDGRLFNAIIHRHKPLLIDMNKVYRQTNLENLDQAFSVAERDLGVTRLLDPEDVDVPQPDEKSIITYVSSLYDAMPRVPDVQDGVRANELQLRWQEYRELVLLLLQWMRHHTAAFEERRFPSSFEEIEILWSQFLKFKEMELPAKEADKNRSKGIYQSLEGAVQAGQLKVPPGYHPLDVEKEWGKLHVAILEREKQLRSEFERLECLQRIVTKLQMEAGLCEEQLNQADALLQSDVRLLAAGKVPQRAGEVERDLDKADSMIRLLFNDVQTLKDGRHPQGEQMYRRVYRLHERLVAIRTEYNLRLKAGVAAPATQVAQVTLQSVQRRPELEDSTLRYLQDLLAWVEENQHRVDGAEWGVDLPSVEAQLGSHRGLHQSIEEFRAKIERARSDEGQLSPATRGAYRDCLGRLDLQYAKLLNSSKARLRSLESLHSFVAAATKELMWLNEKEEEEVGFDWSDRNTNMTAKKESYSALMRELELKEKKIKELQNAGDRLLREDHPARPTVESFQAALQTQWSWMLQLCCCIEAHLKENAAYFQFFSDVREAEGQLQKLQEALRRKYSCDRSATVTRLEDLLQDAQDEKEQLNEYKGHLSGLAKRAKAVVQLKPRHPAHPMRGRLPLLAVCDYKQVEVTVHKGDECQLVGPAQPSHWKVLSSSGSEAAVPSVCFLVPPPNQEAQEAVTRLEAQHQALVTLWHQLHVDMKSLLAWQSLRRDVQLIRSWSLATFRTLKPEEQRQALHSLELHYQAFLRDSQDAGGFGPEDRLMAEREYGSCSHHYQQLLQSLEQGAQEESRCQRCISELKDIRLQLEACETRTVHRLRLPLDKEPARECAQRIAEQQKAQAEVEGLGKGVARLSAEAEKVLALPEPSPAAPTLRSELELTLGKLEQVRSLSAIYLEKLKTISLVIRGTQGAEEVLRAHEEQLKEAQAVPATLPELEATKASLKKLRAQAEAQQPTFDALRDELRGAQEVGERLQQRHGERDVEVERWRERVAQLLERWQAVLAQTDVRQRELEQLGRQLRYYRESADPLGAWLQDARRRQEQIQAMPLADSQAVREQLRQEQALLEEIERHGEKVEECQRFAKQYINAIKDYELQLVTYKAQLEPVASPAKKPKVQSGSESVIQEYVDLRTHYSELTTLTSQYIKFISETLRRMEEEERLAEQQRAEERERLAEVEAALEKQRQLAEAHAQAKAQAEREAKELQQRMQEEVVRREEAAVDAQQQKRSIQEELQQLRQSSEAEIQAKARQAEAAERSRLRIEEEIRVVRLQLEATERQRGGAEGELQALRARAEEAEAQKRQAQEEAERLRRQVQDESQRKRQAEVELASRVKAEAEAAREKQRALQALEELRLQAEEAERRLRQAEVERARQVQVALETAQRSAEAELQSKRASFAEKTAQLERSLQEEHVAVAQLREEAERRAQQQAEAERAREEAERELERWQLKANEALRLRLQAEEVAQQKSLAQAEAEKQKEEAEREARRRGKAEEQAVRQRELAEQELEKQRQLAEGTAQQRLAAEQELIRLRAETEQGEQQRQLLEEELARLQREAAAATQKRQELEAELAKVRAEMEVLLASKARAEEESRSTSEKSKQRLEAEAGRFRELAEEAARLRALAEEAKRQRQLAEEDAARQRAEAERVLAEKLAAIGEATRLKTEAEIALKEKEAENERLRRLAEDEAFQRRRLEEQAAQHKADIEERLAQLRKASDSELERQKGLVEDTLRQRRQVEEEILALKASFEKAAAGKAELELELGRIRSNAEDTLRSKEQAELEAARQRQLAAEEERRRREAEERVQKSLAAEEEAARQRKAALEEVERLKAKVEEARRLRERAEQESARQLQLAQEAAQKRLQAEEKAHAFAVQQKEQELQQTLQQEQSVLDQLRGEAEAARRAAEEAEEARVQAEREAAQSRRQVEEAERLKQSAEEQAQARAQAQAAAEKLRKEAEQEAARRAQAEQAALRQKQAADAEMEKHKKFAEQTLRQKAQVEQELTTLRLQLEETDHQKNLLDEELQRLKAEATEAARQRSQVEEELFSVRVQMEELSKLKARIEAENRALILRDKDNTQRFLQEEAEKMKQVAEEAARLSVAAQEAARLRQLAEEDLAQQRALAEKMLKEKMQAVQEATRLKAEAELLQQQKELAQEQARRLQEDKEQMAQQLAEETQGFQRTLEAERQRQLEMSAEAERLKLRVAEMSRAQARAEEDAQRFRKQAEEIGEKLHRTELATQEKVTLVQTLEIQRQQSDHDAERLREAIAELEREKEKLQQEAKLLQLKSEEMQTVQQEQLLQETQALQQSFLSEKDSLLQRERFIEQEKAKLEQLFQDEVAKAQQLREEQQRQQQQMEQERQRLVASMEEARRRQHEAEEGVRRKQEELQQLEQQRRQQEELLAEENQRLREQLQLLEEQHRAALAHSEEVTASQVAATKTLPNGRDALDGPAAEAEPEHSFDGLRRKVSAQRLQEAGILSAEELQRLAQGHTTVDELARREDVRHYLQGRSSIAGLLLKATNEKLSVYAALQRQLLSPGTALILLEAQAASGFLLDPVRNRRLTVNEAVKEGVVGPELHHKLLSAERAVTGYKDPYTGQQISLFQAMQKGLIVREHGIRLLEAQIATGGVIDPVHSHRVPVDVAYRRGYFDEEMNRVLADPSDDTKGFFDPNTHENLTYLQLLERCVEDPETGLCLLPLTDKAAKGGELVYTDSEARDVFEKATVSAPFGKFQGKTVTIWEIINSEYFTAEQRRDLLRQFRTGRITVEKIIKIIITVVEEQEQKGRLCFEGLRSLVPAAELLESRVIDRELYQQLQRGERSVRDVAEVDTVRRALRGANVIAGVWLEEAGQKLSIYNALKKDLLPSDMAVALLEAQAGTGHIIDPATSARLTVDEAVRAGLVGPEFHEKLLSAEKAVTGYRDPYTGQSVSLFQALKKGLIPREQGLRLLDAQLSTGGIVDPSKSHRVPLDVACARGCLDEETSRALSAPRADAKAYSDPSTGEPATYGELQQRCRPDQLTGLSLLPLSEKAARARQEELYSELQARETFEKTPVEVPVGGFKGRTVTVWELISSEYFTAEQRQELLRQFRTGKVTVEKVIKILITIVEEVETLRQERLSFSGLRAPVPASELLASGVLSRAQFEQLKDGKTTVKDLSELGSVRTLLQGSGCLAGIYLEDTKEKVSIYEAMRRGLLRATTAALLLEAQAATGFLVDPVRNQRLYVHEAVKAGVVGPELHEQLLSAEKAVTGYRDPYSGSTISLFQAMQKGLVLRQHGIRLLEAQIATGGIIDPVHSHRVPVDVAYQRGYFSEEMNRVLADPSDDTKGFFDPNTHENLTYRQLLERCVEDPETGLRLLPLKGAEKAEVVETTQVYTEEETRRAFEETQIDIPGGGSHGGSTMSLWEVMQSDLIPEEQRAQLMADFQAGRVTKERMIIIIIEIIEKTEIIRQQGLASYDYVRRRLTAEDLFEARIISLETYNLLREGTRSLREALEAESAWCYLYGTGSVAGVYLPGSRQTLSIYQALKKGLLSAEVARLLLEAQAATGFLLDPVKGERLTVDEAVRKGLVGPELHDRLLSAERAVTGYRDPYTEQTISLFQAMKKELIPTEEALRLLDAQLATGGIVDPRLGFHLPLEVAYQRGYLNKDTHDQLSEPSEVRSYVDPSTDERLSYTQLLRRCRRDDGTGQLLLPLSDARKLTFRGLRKQITMEELVRSQVMDEATALQLREGLTSIEEVTKNLQKFLEGTSCIAGVFVDATKERLSVYQAMKKGIIRPGTAFELLEAQAATGYVIDPIKGLKLTVEEAVRMGIVGPEFKDKLLSAERAVTGYKDPYSGKLISLFQAMKKGLILKDHGIRLLEAQIATGGIIDPEESHRLPVEVAYKRGLFDEEMNEILTDPSDDTKGFFDPNTEENLTYLQLMERCITDPQTGLCLLPLKEKKRERKTSSKSSVRKRRVVIVDPETGKEMSVYEAYRKGLIDHQTYLELSEQECEWEEITISSSDGVVKSMIIDRRSGRQYDIDDAIAKNLIDRSALDQYRAGTLSITEFADMLSGNAGGFRSRSSSVGSSSSYPISPAVSRTQLASWSDPTEETGPVAGILDTETLEKVSITEAMHRNLVDNITGQRLLEAQACTGGIIDPSTGERFPVTDAVNKGLVDKIMVDRINLAQKAFCGFEDPRTKTKMSAAQALKKGWLYYEAGQRFLEVQYLTGGLIEPDTPGRVPLDEALQRGTVDARTAQKLRDVGAYSKYLTCPKTKLKISYKDALDRSMVEEGTGLRLLEAAAQSTKGYYSPYSVSGSGSTAGSRTGSRTGSRAGSRRGSFDATGSGFSMTFSSSSYSSSGYGRRYASGSSASLGGPESAVA

SEQ ID NO: 75 - protein, 4533 aa, Homo sapiens
MAGPLPDEQDFIQAYEEVREKYKDERDRVQKKTFTKWVNKHLIKAQRHISDLYEDLRDGHNLISLLEVLSGDSLPREKGRMRFHKLQNVQIALDYLRHRQVKLVNIRNDDIADGNPKLTLGLIWTIILHFQISDIQVSGQSEDMTAKEKLLLWSQRMVEGYQGLRCDNFTSSWRDGRLFNAIIHRHKPLLIDMNKVYRQTNLENLDQAFSVAERDLGVTRLLDPEDVDVPQPDEKSIITYVSSLYDAMPRVPDVQDGVRANELQLRWQEYRELVLLLLQWMRHHTAAFEERRFPSSFEEIEILWSQFLKFKEMELPAKEADKNRSKGIYQSLEGAVQAGQLKVPPGYHPLDVEKEWGKLHVAILEREKQLRSEFERLECLQRIVTKLQMEAGLCEEQLNQADALLQSDVRLLAAGKVPQRAGEVERDLDKADSMIRLLFNDVQTLKDGRHPQGEQMYRRVYRLHERLVAIRTEYNLRLKAGVAAPATQVAQVTLQSVQRRPELEDSTLRYLQDLLAWVEENQHRVDGAEWGVDLPSVEAQLGSHRGLHQSIEEFRAKIERARSDEGQLSPATRGAYRDCLGRLDLQYAKLLNSSKARLRSLESLHSFVAAATKELMWLNEKEEEEVGFDWSDRNTNMTAKKESYSALMRELELKEKKIKELQNAGDRLLREDHPARPTVESFQAALQTQWSWMLQLCCCIEAHLKENAAYFQFFSDVREAEGQLQKLQEALRRKYSCDRSATVTRLEDLLQDAQDEKEQLNEYKGHLSGLAKRAKAVVQLKPRHPAHPMRGRLPLLAVCDYKQVEVTVHKGDECQLVGPAQPSHWKVLSSSGSEAAVPSVCFLVPPPNQEAQEAVTRLEAQHQALVTLWHQLHVDMKSLLAWQSLRRDVQLIRSWSLATFRTLKPEEQRQALHSLELHYQAFLRDSQDAGGFGPEDRLMAEREYGSCSHHYQQLLQSLEQGAQEESRCQRCISELKDIRLQLEACETRTVHRLRLPLDKEPARECAQRIAEQQKAQAEVEGLGKGVARLSAEAEKVLALPEPSPAAPTLRSELELTLGKLEQVRSLSAIYLEKLKTISLVIRGTQGAEEVLRAHEEQLKEAQAVPATLPELEATKASLKKLRAQAEAQQPTFDALRDELRGAQEVGERLQQRHGERDVEVERWRERVAQLLERWQAVLAQTDVRQRELEQLGRQLRYYRESADPLGAWLQDARRRQEQIQAMPLADSQAVREQLRQEQALLEEIERHGEKVEECQRFAKQYINAIKDYELQLVTYKAQLEPVASPAKKPKVQSGSESVIQEYVDLRTHYSELTTLTSQYIKFISETLRRMEEEERLAEQQRAEERERLAEVEAALEKQRQLAEAHAQAKAQAEREAKELQQRMQEEVVRREEAAVDAQQQKRSIQEELQQLRQSSEAEIQAKARQAEAAERSRLRIEEEIRVVRLQLEATERQRGGAEGELQALRARAEEAEAQKRQAQEEAERLRRQVQDESQRKRQAEVELASRVKAEAEAAREKQRALQALEELRLQAEEAERRLRQAEVERARQVQVALETAQRSAEAELQSKRASFAEKTAQLERSLQEEHVAVAQLREEAERRAQQQAEAERAREEAERELERWQLKANEALRLRLQAEEVAQQKSLAQAEAEKQKEEAEREARRRGKAEEQAVRQRELAEQELEKQRQLAEGTAQQRLAAEQELIRLRAETEQGEQQRQLLEEELARLQREAAAATQKRQELEAELAKVRAEMEVLLASKARAEEESRSTSEKSKQRLEAEAGRFRELAEEAARLRALAEEAKRQRQLAEEDAARQRAEAERVLAEKLAAIGEATRLKTEAEIALKEKEAENERLRRLAEDEAFQRRRLEEQAAQHKADIEERLAQLRKASDSELERQKGLVEDTLRQRRQVEEEILALKASFEKAAAGKAELELELGRIRSNAEDTLRSKEQAELEAARQRQLAAEEERRRREAEERVQKSLAAEEEAARQRKAALEEVERLKAKVEEARRLRERAEQESARQLQLAQEAAQKRLQAEEKAHAFAVQQKEQELQQTLQQEQSVLDQLRGEAEAARRAAEEAEEARVQAEREAAQSRRQVEEAERLKQSAEEQAQARAQAQAAAEKLRKEAEQEAARRAQAEQAALRQKQAADAEMEKHKKFAEQTLRQKAQVEQELTTLRLQLEETDHQKNLLDEELQRLKAEATEAARQRSQVEEELFSVRVQMEELSKLKARIEAENRALILRDKDNTQRFLQEEAEKMKQVAEEAARLSVAAQEAARLRQLAEEDLAQQRALAEKMLKEKMQAVQEATRLKAEAELLQQQKELAQEQARRLQEDKEQMAQQLAEETQGFQRTLEAERQRQLEMSAEAERLKLRVAEMSRAQARAEEDAQRFRKQAEEIGEKLHRTELATQEKVTLVQTLEIQRQQSDHDAERLREAIAELEREKEKLQQEAKLLQLKSEEMQTVQQEQLLQETQALQQSFLSEKDSLLQRERFIEQEKAKLEQLFQDEVAKAQQLREEQQRQQQQMEQERQRLVASMEEARRRQHEAEEGVRRKQEELQQLEQQRRQQEELLAEENQRLREQLQLLEEQHRAALAHSEEVTASQVAATKTLPNGRDALDGPAAEAEPEHSFDGLRRKVSAQRLQEAGILSAEELQRLAQGHTTVDELARREDVRHYLQGRSSIAGLLLKATNEKLSVYAALQRQLLSPGTALILLEAQAASGFLLDPVRNRRLTVNEAVKEGVVGPELHHKLLSAERAVTGYKDPYTGQQISLFQAMQKGLIVREHGIRLLEAQIATGGVIDPVHSHRVPVDVAYRRGYFDEEMNRVLADPSDDTKGFFDPNTHENLTYLQLLERCVEDPETGLCLLPLTDKAAKGGELVYTDSEARDVFEKATVSAPFGKFQGKTVTIWEIINSEYFTAEQRRDLLRQFRTGRITVEKIIKIIITVVEEQEQKGRLCFEGLRSLVPAAELLESRVIDRELYQQLQRGERSVRDVAEVDTVRRALRGANVIAGVWLEEAGQKLSIYNALKKDLLPSDMAVALLEAQAGTGHIIDPATSARLTVDEAVRAGLVGPEFHEKLLSAEKAVTGYRDPYTGQSVSLFQALKKGLIPREQGLRLLDAQLSTGGIVDPSKSHRVPLDVACARGCLDEETSRALSAPRADAKAYSDPSTGEPATYGELQQRCRPDQLTGLSLLPLSEKAARARQEELYSELQARETFEKTPVEVPVGGFKGRTVTVWELISSEYFTAEQRQELLRQFRTGKVTVEKVIKILITIVEEVETLRQERLSFSGLRAPVPASELLASGVLSRAQFEQLKDGKTTVKDLSELGSVRTLLQGSGCLAGIYLEDTKEKVSIYEAMRRGLLRATTAALLLEAQAATGFLVDPVRNQRLYVHEAVKAGVVGPELHEQLLSAEKAVTGYRDPYSGSTISLFQAMQKGLVLRQHGIRLLEAQIATGGIIDPVHSHRVPVDVAYQRGYFSEEMNRVLADPSDDTKGFFDPNTHENLTYRQLLERCVEDPETGLRLLPLKGAEKAEVVETTQVYTEEETRRAFEETQIDIPGGGSHGGSTMSLWEVMQSDLIPEEQRAQLMADFQAGRVTKERMIIIIIEIIEKTEIIRQQGLASYDYVRRRLTAEDLFEARIISLETYNLLREGTRSLREALEAESAWCYLYGTGSVAGVYLPGSRQTLSIYQALKKGLLSAEVARLLLEAQAATGFLLDPVKGERLTVDEAVRKGLVGPELHDRLLSAERAVTGYRDPYTEQTISLFQAMKKELIPTEEALRLLDAQLATGGIVDPRLGFHLPLEVAYQRGYLNKDTHDQLSEPSEVRSYVDPSTDERLSYTQLLRRCRRDDGTGQLLLPLSDARKLTFRGLRKQITMEELVRSQVMDEATALQLREGLTSIEEVTKNLQKFLEGTSCIAGVFVDATKERLSVYQAMKKGIIRPGTAFELLEAQAATGYVIDPIKGLKLTVEEAVRMGIVGPEFKDKLLSAERAVTGYKDPYSGKLISLFQAMKKGLILKDHGIRLLEAQIATGGIIDPEESHRLPVEVAYKRGLFDEEMNEILTDPSDDTKGFFDPNTEENLTYLQLMERCITDPQTGLCLLPLKEKKRERKTSSKSSVRKRRVVIVDPETGKEMSVYEAYRKGLIDHQTYLELSEQECEWEEITISSSDGVVKSMIIDRRSGRQYDIDDAIAKNLIDRSALDQYRAGTLSITEFADMLSGNAGGFRSRSSSVGSSSSYPISPAVSRTQLASWSDPTEETGPVAGILDTETLEKVSITEAMHRNLVDNITGQRLLEAQACTGGIIDPSTGERFPVTDAVNKGLVDKIMVDRINLAQKAFCGFEDPRTKTKMSAAQALKKGWLYYEAGQRFLEVQYLTGGLIEPDTPGRVPLDEALQRGTVDARTAQKLRDVGAYSKYLTCPKTKLKISYKDALDRSMVEEGTGLRLLEAAAQSTKGYYSPYSVSGSGSTAGSRTGSRTGSRAGSRRGSFDATGSGFSMTFSSSSYSSSGYGRRYASGSSASLGGPESAVA

SEQ ID NO: 76 - protein, 697 aa, Homo sapiens
MQAHELFRYFRMPELVDFRQYVRTLPTNTLMGFGAFAALTTFWYATRPKPLKPPCDLSMQSVEVAGSGGARRSALLDSDEPLVYFYDDVTTLYEGFQRGIQVSNNGPCLGSRKPDQPYEWLSYKQVAELSECIGSALIQKGFKTAPDQFIGIFAQNRPEWVIIEQGCFAYSMVIVPLYDTLGNEAITYIVNKAELSLVFVDKPEKAKLLLEGVENKLIPGLKIIVVMDAYGSELVERGQRCGVEVTSMKAMEDLGRANRRKPKPPAPEDLAVICFTSGTTGNPKGAMVTHRNIVSDCSAFVKATENTVNPCPDDTLISFLPLAHMFERVVECVMLCHGAKIGFFQGDIRLLMDDLKVLQPTVFPVVPRLLNRMFDRIFGQANTTLKRWLLDFASKRKEAELRSGIIRNNSLWDRLIFHKVQSSLGGRVRLMVTGAAPVSATVLTFLRAALGCQFYEGYGQTECTAGCCLTMPGDWTAGHVGAPMPCNLIKLVDVEEMNYMAAEGEGEVCVKGPNVFQGYLKDPAKTAEALDKDGWLHTGDIGKWLPNGTLKIIDRKKHIFKLAQGEYIAPEKIENIYMRSEPVAQVFVHGESLQAFLIAIVVPDVETLCSWAQKRGFEGSFEELCRNKDVKKAILEDMVRLGKDSGLKPFEQVKGITLHPELFSIDNGLLTPTMKAKRPELRNYFRSQIDDLYSTIK

SEQ ID NO: 77 - protein, 688 aa, Homo sapiens
MQAHELFRYFRMPELVDFRQYVRTLPTNTLMGFGAFAALTTFWYATRPKPLKPPCDLSMQSVEVAGSGGARRSALLDSDEPLVYFYDDVTTLYEGFQRGIQVSNNGPCLGSRKPDQPYEWLSYKQVAELSECIGSALIQKGFKTAPDQFIGIFAQNRPEWVIIEQGCFAYSMVIVPLYDTLGNEAITYIVNKAELSLVFVDKPEKAKLLLEGVENKLIPGLKIIVVMDAYGSELVERGQRCGVEVTSMKAMEDLGRANRRKPKPPAPEDLAVICFTSGTTGNPKGAMVTHRNIVSDCSAFVKATENTVNPCPDDTLISFLPLAHMFERVVECVMLCHGAKIGFFQGDIRLLMDDLKVLQPTVFPVVPRLLNRMFDRIFGQANTTLKRWLLDFASKRKEAELRSGIIRNNSLWDRLIFHKVQSSLGGRVRLMVTGAAPVSATVLTFLRAALGCQFYEGYGQTECTAGCCLTMPGDWTAGHVGAPMPCNLIKLVDVEEMNYMAAEGEGEGYLKDPAKTAEALDKDGWLHTGDIGKWLPNGTLKIIDRKKHIFKLAQGEYIAPEKIENIYMRSEPVAQVFVHGESLQAFLIAIVVPDVETLCSWAQKRGFEGSFEELCRNKDVKKAILEDMVRLGKDSGLKPFEQVKGITLHPELFSIDNGLLTPTMKAKRPELRNYFRSQIDDLYSTIKV

SEQ ID NO: 78 - protein, 698 aa, Homo sapiens
MQAHELFRYFRMPELVDFRQYVRTLPTNTLMGFGAFAALTTFWYATRPKPLKPPCDLSMQSVEVAGSGGARRSALLDSDEPLVYFYDDVTTLYEGFQRGIQVSNNGPCLGSRKPDQPYEWLSYKQVAELSECIGSALIQKGFKTAPDQFIGIFAQNRPEWVIIEQGCFAYSMVIVPLYDTLGNEAITYIVNKAELSLVFVDKPEKAKLLLEGVENKLIPGLKIIVVMDAYGSELVERGQRCGVEVTSMKAMEDLGRANRRKPKPPAPEDLAVICFTSGTTGNPKGAMVTHRNIVSDCSAFVKATEKALPLSASDTHISYLPLAHIYEQLLKCVMLCHGAKIGFFQGDIRLLMDDLKVLQPTVFPVVPRLLNRMFDRIFGQANTTLKRWLLDFASKRKEAELRSGIIRNNSLWDRLIFHKVQSSLGGRVRLMVTGAAPVSATVLTFLRAALGCQFYEGYGQTECTAGCCLTMPGDWTAGHVGAPMPCNLIKLVDVEEMNYMAAEGEGEVCVKGPNVFQGYLKDPAKTAEALDKDGWLHTGDIGKWLPNGTLKIIDRKKHIFKLAQGEYIAPEKIENIYMRSEPVAQVFVHGESLQAFLIAIVVPDVETLCSWAQKRGFEGSFEELCRNKDVKKAILEDMVRLGKDSGLKPFEQVKGITLHPELFSIDNGLLTPTMKAKRPELRNYFRSQIDDLYSTIKV

SEQ ID NO: 79 - protein, 192 aa, Homo sapiens
MQAIKCVVVGDGAVGKTCLLISYTTNAFPGEYIPTVFDNYSANVMVDGKPVNLGLWDTAGQEDYDRLRPLSYPQTDVFLICFSLVSPASFENVRAKWYPEVRHHCPNTPIILVGTKLDLRDDKDTIEKLKEKKLTPITYPQGLAMAKEIGAVKYLECSALTQRGLKTVFDEAIRAVLCPPPVKKRKRKCLLL

SEQ ID NO: 80 - protein, 211 aa, Homo sapiens
MQAIKCVVVGDGAVGKTCLLISYTTNAFPGEYIPTVFDNYSANVMVDGKPVNLGLWDTAGQEDYDRLRPLSYPQTVGETYGKDITSRGKDKPIADVFLICFSLVSPASFENVRAKWYPEVRHHCPNTPIILVGTKLDLRDDKDTIEKLKEKKLTPITYPQGLAMAKEIGAVKYLECSALTQRGLKTVFDEAIRAVLCPPPVKKRKRKCLLL

SEQ ID NO: 81 - protein, 201 aa, Homo sapiens
MEYLIGIQGPDYVLVASDRVAASNIVQMKDDHDKMFKMSEKILLLCVGEAGDTVQFAEYIQKNVQLYKMRNGYELSPTAAANFTRRNLADCLRSRTPYHVNLLLAGYDEHEGPALYYMDYLAALAKAPFAAHGYGAFLTLSILDRYYTPTISRERAVELLRKCLEELQKRFILNLPTFSVRIIDKNGIHDLDNISFPKQGS

SEQ ID NO: 82 - protein, 193 aa, Homo sapiens
MQSLMQAPLLIALGLLLAAPAQAHLKKPSQLSSFSWDNCDEGKDPAVIRSLTLEPDPIIVPGNVTLSVMGSTSVPLSSPLKVDLVLEKEVAGLWIKIPCTDYIGSCTFEHFCDVLDMLIPTGEPCPEPLRTYGLPCHCPFKEGTYSLPKSEFVVPDLELPSWLTTGNYRIESVLSSSGKRLGCIKIAASLKGI

SEQ ID NO: 83 - DNA, 6922 bp, Homo sapiens
ggcagaggggaaatggggcctggcccacgggagagctgaggcccacgtttggccaggacagggtggatggaggctggggcctccgcagggaagatggacaggtaggatccggggtgggcagagagggagagctggcttggacggaggcagggatctgggggctgtgccatggaccctgtgaggtggctgggctgtgaaactcagtggagaccggaattattattattattattatttttttgagatggagtctcactgtctcccgggctggagtgcagtggcacgatctcggctcactgcaagctccgcctcctgggttcacgccattctcctgcctcagcctcctgagtagctgggactacaggcgcccaccaccacgcccggctaattttttgtatctttagtagagatggggtttcaccgtgttagccaggaaggtcttgatctcctgacctcatgatccgcccgcctcggcctcccaaagtgctgagattacaggtgtgagccaccgctcccggcctggagaccagatttgagccctgggaccctacattcccgatgggcagcggacctcaaggcacaccggccccgcctccctggactctccccgtatccgccccttggaggggcaaactgccctcagagggctcccacaggcccagacacaaactggtgtccccaagggtgtgggggacacggtaagctccagacctcagtttcaccttggaaatgagcccctttgtaaaaaatggaggtgagtttggacgcagtagctcacacctgtgctcccagcactttgggaggccgaggcaggtggattgcttgagcttaggagtttcaaaccagcccgagcaacatagtgagactccacctctacaaaaaaatacaaaaattagccgggcatggtggcatgtgcctatggtcccagctacctgggaggctgaggcaggaggattgctggaacccgggaatcggaggctgcagcgagctgagatcgtgccactgcactccaccctgggcaacatagtgagatcccatctctacaaaatatacaaaaattagccgggcacggtggcgggtgcctgtggtcccagctactcgggaggctgaggcaggaggatcagttgaacccaggagattgaggctgcagtgagctgagatggtgccgctgccctccagcctgggcaacagcgagacctcaactctgaaaaaaacaaaagaaggagatgaaatttacataacttaaaattagccattttgaacggtacagtgaagtggttttcggtgcattcaccgacttgtgcaaccatcactgctgtccagtcccagaacattccatcaccccaaagaaggaagccccatctccatccatcagccatcaccccctgccctcccccggcccctggcaaccacagatccacttcctgcctctgcagatttgcttgttctggacatttcgtctatttatttttatatagtttttaatttgtttttatttattttttttgagacggagtctctctgtgtcacccaggctggagtgcagtggcgcaatctcggctcactgcaacctccacctcccaggttcaagcgattatcctgtctcagcttcccaagtagctgggactataggcgcccgccaccacgcccagctaatttcttttttttttttgaaatggagttttgctcttgtcgcccaggctggagtgcaatggtgcgatctcggctcgctgcaacctccgcctcccaggttcaagtgattctcctgcctcagcctcctgagtagctgggattacaggcatgtgccaccacgcccagttaattttgtatttttagtagagatggggtttctccatgttggtcaggctggtcttgaacgcccaacctcaggtgatctgcctgcctcggcctcccagagtgctaggattacaggtgtgagccaccgcacccagcttgtcaattatatctcaataaagctgttgaaaaagtttaaaaaaatcacccaatcgggcacagtgtttcacacctgtaatcccagcattttgggaggccgaggtgggtggatcacctgaggtcgggagtttgagaccagcctggccaatatagtgaaaccccatctctactaaaaatacaaaaaattagccaggcgtggtggtggacaactgtaatcctagctactcaggaggctgagacaggagaatcacttgagcctgggaggcggaggttgcagtgagtcgagatcacaccattgcactccagcctgggcaacaagagcgaaactccgtctcaaaataataataataataataataataataatcacccatacagacgcgcaggactcaacgcaggactgccagctccactgccctgagccccccggtgccaggcccagcgggcagtgctggagccccagtggcttgggatggggagactgggactctgagctggcaatgttcctgggtgctggctgcatgcccgccatgtgctgggctccgggatccactggttcctgacaccctcacctgcccctgggggtgtggccatcttctagagagggaaactgaggatcagtgcagaatgtagggggagcccaggctggcccagggagcagttggcggtggaggccttgggcaatttcccgtgttcccactgagtggggctgtccctgggcctgggcggggacgccaccaactgccaaggcctgtgtataagggcagccgccgccttagccacagacctgccccgccatgacccggctgacagtcctggccctgctggctggtctgctggcgtcctcgagggccggtgagtgcctctctgtgccggtggtcccccatctgtgctagggcccggctgccagggcagaactcagacttaaagcacagagaaggcaagcggcttggcctgggtcacacagccagcccggcctggacgatcccgcgaaaggcgtgagggcggacggtgtgcgggactcaggggccccctgtcctcttagggagtgggacgatgggggagggtgggtccccccgcagccccactgggtggatagagctgaggctgcagcttcacacgccctcccggccactgtgtggattcttggggatctcagagctgtctccccccgacccaggctccagcccccttttggacatcgttggcggccggaaggcgaggccccgccagttcccgttcctggcctccattcagaatcaaggcaggcacttctgcgggggtgccctgatccatgcccgcttcgtgatgaccgcggccagctgcttccaaagccagtgaggggtcctggggagggggcctagggggcattggggctcagagaaggggcttggggggcttaggcattcagtgggggtgcttggtaggtgaggaggggaggggattgcaaaaggaggggctcagggaaaggagggggcttggagagggaaatggggactgagttgaggagggacccaaggatattggggggctcagatggaggaggcccagagaagggaagggggtcagatggaggaggcccagagaaaggaagaggctcagatggaggaggtgcagtgaaggaaagggggtcagatgggggaggcccagagaagggaaggggctcagatggaggagggggcccagagaaaggaaggggctcagatggaggaggtgcagagaagggaagggggtcagatgggggaggcccagagaagggaaggggctcagatggaggaggtgcagagaagggaaggggctcagatggaggaggtgcagagaagagaagggcctcagatggaggaggtgcagagaagggaagggcctcagatggaggaggtgcggagaagggaagggggtcagatggaggaggtgcagagaagggaagggggtcagatgggggaggcccagggaagggaaggggctcagatggaggaggggcagagaagggaagggggtcagatgggggaggcccagggaagggaaggggctcagatgggggaggcgcagagaagggaagggggtcagatggaggaggtgcagagaagggaagggggtcagatgggggaggcccagataagggaatggggtcagatgggggaggtgcagagaagggaagggggtcagatgggggaggcccagataagggaaggggctcagatggaggaggtgcagagaaggggagggggtcagatggaggaggctcagagaagggaagggactcagatggaggagggggcgcagagaagagaaggggctcagatggaggaggaggcgcagagaagggaaggggctcaagatgggaagggggccctggaaagtctcggctctgcttctgtaaaagcgggggagttttcagggtgaaggattgcagtctgcaggctgggatcccccctaatttgcaagccggcttgctctgtgcccaggccccagcctggtgtcctccctctgccctttcctccgctactctcaggaaccccggggttagcaccgtggtgctgggtgcctatgacctgaggcggcgggagaggcagtcccgccagacgttttccatcagcagcatgagcgagaatggctacgacccccagcagaacctgaacgacctgatgctgcttcaggtgagaggatggtgccacctgtgatcccagcacctcgggaggccgacgttagccagggaaacaagtccaaacttggtctctacaaaaaaatacaaaaattagccgggagtggtggcgcgcacctgtggcccctgtgcttcaggaggccgaggcggaaggacggcttgaggtcaggagttcgagaccagcctgggcaacatggccaaactcagtctctacaaaaatatatatgtgtgtgtgtgtgtgtgtgtgtgtgtgtgtgtgtgtgtatcttgccgggtgaggtggctcatgcctgtaatcccagcattttgggaggccgaggtgggcggatcacgaggtcaggagattgagaccagcctggccaacatggtgaaaccccatctctactaaaaatacaaaaattagccaggcatggcagcgggcgcctctagtcccagctactcaggaggctgaggcaggagaatcgcttgaacccgggaggcggagcttgcagtgagccgagatcgcgcccctgcactccagcctgggtaacagagccagaccctatctcaaaaaaaacttccaaaaacaatacagcaacacatacagatgtaccacggttcgcgtatggagcctcctgttggtggagactgacgtcgttttcaaatgcttttgctatgacagaatcatgtgaatgtttttcatgtttggtttttttctttgagaaaatgataaaattatctcaaaaatatcattaaaaaatttaaaaaagtagagacgggggtttcaccttgttggccagtttggtctcgaactcctggcctcaagtgatccacccaccttggcctcgcaacgtgctgggaatacaggcgtgagccaccgcacccggcccctgccgggaattaaacgcaaaccacttacagactacagttaatgtcgctgacacttctgctcccaggggtccccatgaggctccagtccccagggccaccctcccctgactccatttccttccccagctggaccgtgaggccaacctcaccagcagcgtgacgatactgccactgcctctgcagaacgccacggtggaagccggcaccagatgccaggtggccggctgggggagccagcgcagtggggggcgtctctcccgttttcccaggtttgtcaacgtgactgtgacccccgaggaccagtgtcgccccaacaacgtgtgcaccggtgtgctcacccgccgcggtggcatctgcaatgtgagtgctccctgtggcgggaggaggggtcctgagaggtactgagctctccgtggcaggagaaagcaagtgcaggctgagggcggcacagcaggggggccccaggattgagcattttcacggtaggagaaacagtatctttttttttttttttgagacagagtctcgctctgtcgcccaggctggagtgtagtggcgtgatctcggcggctcactgcaacctccgcctcctgggttcaagcgattctcctgcctcagcctcctaagtagctgggattacaggcatgcgccaccacgcccggctaattttgtatttttagtagagacagggtttctccatgtgggtcaggctggtctcgaactcctgacctcatgatcgacccaccttggcctcccaaagtgttaggataacaggcatgagccaccgtgcctggctgagaaacagtagctatcaaacgccggctgtgagccacgtctgtgctgggggttggggacccagcaggcatggtagagccggtcactgagggactcaggcgtgtgattgccaggggaggggcacctggcccagcctggaggtgccaggaagctccagaaagcaactgatcccaaagtccactagcagttaaccagggcagagaaagagaagagccatgcaaaggccctggggctggatcaggacttgtaggttccaggggcagcaagaggcctctgcagttctggggtggcgtgggagccaggccctgggacgccctgacacagctgctgcctgcccagggggacgggggcacccccctcgtctgcgagggcctggcccacggcgtggcctccttttccctggggccctgtggccgaggccctgacttcttcacccgagtggcgctcttccgagactggatcgatggtgttctcaacaacccgggaccggggccagcctaggggggcctgtgacctcccatggagcccagccccgccctccacacctccggcgctccgcacccacctcccacggccccgcccctgcccccgctccggccagaggggccctggctgtaataaagaagccgatctctcctctgc

SEQ ID NO: 84 - DNA, 14692 bp, Homo sapiens
ggggacgcggcacagatagggggaagccggagtaatggttttcgggcaagtggatgttggagagcacacacaggagttggggggcgggggagggcctggggttggggagggctcgaactcggggctgctgggtagtccaggagggcgcggtaaggctggggtatcctggtgagaactggagaggatctacccgggtccctgcctggccagtggggaaacaccggtcccccaggcaccttcacctaaccagagcggggatttccaccgcccctcatgccgccctttggaggaaagtgaaagtgaaaggaggaagaggaggctaaatggctgaggaggtcgcagcgccatgaagtccctgtctctgctcctcgctgtggctttgggtgagcgaaccccgcgactcatcgcccaagaactagagggaagcggagggaggtggccccactggagccgatgccagggtgggagtggggcaggtcaccagacatacaaaccgctcctcactcgcgtccctatacgccaggcctggcgaccgccgtctcagcaggacccgcggtgatcgagtgttggttcgtggaggatgcgagcggaaagggcctggccaagagacccggtgcactgctgttgcgccagggaccgggggaaccgccgccccggccggacctcgaccctgagctctatctcagtgtacacggtgagtctctagggactcgccgcccccctacctctgtcgcctccaccgaaaccccctcctctttagatccggcagtgacctcaggcctcagcttcccctttgtaaagtgagtctcactacggggtagtctgtgcatttgaagttccccgaacgctgcccttccagcccctttcccggcggtgactctacagctgcaacttccttctctacactcagaccccgcgggcgccctccaggctgccttcaggcggtatccccggggcgcccccgcaccacactgcgagatgagccgcttcgtgcctctccccgcctctgcgaaatgggccagcggcctgacccccgcgcagaactgcccgcgggccctggatggggcttggctgatggtcagcatatccagcccagtcctcagcctctccagcctcttgcgaccacagccagagcctcagcaggagcctgttctcatcaccatggcaacaggtagctggggaggggaggtggagaagggtgggtagattctaagggtccagatcagccggtggtctcgctttatggacttgagcaagacatttcgccaatcggggttcagtttcctttttttgttaagagaggtggtttggctagaatgaatcaatctctaccgctccttctagccctcacccagttaaaaaaaaaaacaaaaaaaaaactgcagcttggcagggggtagggggaaagcagggccgggcaggggggttactttctggtgtttcgaagggcggggctttgaagaggtggggtttcccgacaccagaccttgagagacttgtcaggtgatgcgaggtgggaggggttcagaagcagcagcgttttttctctgctcttcccagatctgtgtcttgctctgcaccctcagctttgcgggtcactctttcaaaacccagcactctatccccacctgcgcccacacccggcgctgcggcaatcctcaaagcaaaggctcttgcactctagcgcgttgaccttgcctgacagccccgtgtagggatgtgctgccgctctgtggtccgcaaacaggtgggctcgagtgggcggatggacgcggctggagattggatagctcctattgcactgaaaggtgcattgcagtttgaggcccaggagtcagaagcttttctaggctgagacgtgggagggactgtgcagataattcaagaatgaggagagtctgacctggatatctgggagctctccctcctggcagcggaggcggggtattccggggtagaataccggtagagttcttagcttttctatctggattttatgtcagcgacacagcccgatggacagggcaaccccaaccaatccctgcaccctcccttccctccaccctcctgagaattacccacagaaccagggagacagacttgaaacccacgctgaaaccctcacctctgcctatacctccattcttagtctcaagcccccaccctggcagaagctgaggaacactgctcttgtgtagacagtagctctctctggtggggtggaatatttcctagggctactggctccaccgaggtgatgatgagaatggtctttgctttctgagtttgtttttccaactgtaaaatgtggatactatttcccagctgcttttcttgttgtgactatcaagagatggcactgtgttaatttatccattgattcaataaatactttttagcaccaagaatgagttaggactcagcagttctcagtccacactgttggaggtttctaaaatatactgaaacctgattcaatcccatgcttagcttggccgattaaatcagaatctctggggtggccctgggtgcccttaagggtcacaaagatgatctgatgtagactctgctctccaggaggttctgggcgtatttgccacggataatcctaatgtaaagtagaaagtgaaggacatgcagacagggagccctggaagtgcccgggtggtaagattgtctgtatttcacaaacaactggggtcaaagcaaggtgctgtgctatttatttatttttattttatttatttatttatttttgagacagagttttgctcttgttgcccaggctggagtgcaatggcgtgatctcacgctcaccggaacctccgcctccctggttcaagcaattctcctgcctcagcctcccgagtagctgggattacaggtgcctgccaccacacccagctaattttgtatttttagtagagatgaggtttctccatgttggtaaggctggtctcgaactcccaacttcaggtgatcctcccacctcgcctcccgaagtgctgggattacaagcgtgagccactgcgcctgcctgctatttatttatttatttatttttgagacggagtctccctcttattgcccaggctagagtgcagttgcagtggcatgatcttggctcactgcaacctccgtctcccatgttcaagcaattcttgtgccttagcctccccagtagctgggattacaggcttgtgccaccacgcccacctaatttttgtatttttattggagacaggtttcaccatgttggccaggatggtcttgaactcctgacctaaggtgatccacccaccttggccttccaaagtgctgggattacaggcatgagccaccacgcctggcctgctgtgctctttcttttcaagcatttctgcttgatcagggatttaagaaaatgaaagctgttgtactgatgtaaaattagaaatgaaatctctccagggtccaagatcattcatgattttgctaatatacatttatacttgtcttatcaaatatttttaaatgtttattgacaaatatgcttatttatttatttatttgagacagggtctccctctgtcgcccaggctggagtgcagtgcaggctggagagcagtggcatgatctcagctcactgcaacctccacctccgtggctcaagtgatcctcgtgcctcagtctcctgagtagctgagaccacaggcatgtgccaccatgcccagctaatttttgtattttttttgtggagatgggtttttgtcaggttgcccaggctggtcttggactcctgggctcaattgatctgcccaccttggcctccgaaactgctgggattacacgtgtgagctgcctggccccaaatatactttttttttttttttttttttttgagacagagtctcaccctgttgcccaggctggagtgcaatggtgtgatctctgctcatttcaacttctgcctcctgagttcaagtaattctcctgtctcagcctcccaagtagctgagactacaggcgcccaccaccaggcccagctaatttttgtatttttagtggagacagggtttggtcatgttagccaggctggtcttgaactcctgacctcaggtgatccacccacctcagcctcccaaattgctgggattacaggcgtgagccaccacgccaggcctatactttcttaatatactttgtgtgtatagtgtttaattctcaccattcttttaaaatattatggagtcaggtgaggtgactcacgcctgtacttccagcactttgggaggtctaggtgggaggatcatttgcactcaggagttcaagaccagcctgggcaacataaccagaccttgtctctactaaaaattaaaaaaatgctgggcgcagtggctcatgcctgtaatcccagcactttgggaggccgaggtgggcagatcacctgaggtcgaaagttcaagaccagcctgaccaacatggagaaaccccgtctgtactaaaaatacaaaattagccaggcatggtggtgcatgcctgtaatcccagctactcggaaggctgaggcaagagaattgcttgaacctgggaggcggaggttgcagtgagccaagatcatgccactgcactccagcctgggcaacaagcgtgaaactgtctcaaaaaaaaaaaaaaaaaaaaaaggttgggtgtcgtggcatgtacctatggtcccagctactcgggaggctgtgttgggaggattgcacctttgatgggtgacagagtgagaccctgtctccaaaaaaaaaaaaaaaaaaaaaaaaagagttaaactgtaaaacctttaggtcttgtttattatttttttaaattttttcttttaaatagagatggggtcttgctatgttgcccaggctggtctcaaactgctgggttcaagtgatcctcccacctcagcctcccaaggtactgggattacaagtctgagccaccctgcccagccaggttttgtttattaattctatggattttttttttttgagatcaagttttgctcttgttgcccagtctggagggcaatggcatgatctcggctcaccacaacctccgcctcccaggttcaagtgattctcctgcctcagcttcccaagcagctgtgattacaggcgtgtgccaccatgcccggataattctgtatttttagtagagacggggtttctccagtctggtctcaaactcccaacctcaggtgatccaccggcctcggcctcccaaagtgctgggattacaggcgtgagccactgtgcccagcctgtggatcttttttttttttttaacaattcaaaagtatgtttctggattttgacaaactaagtgaaattgcatactgtttttactctactgaacaattccatgaagatgagaacagtttaaccttataggcctcagaagctaggattaaaaagaacataaaaataattacaagaagaaaaagattacttctacctgaaggacctagacatttctgggaagaaacagcagtgaaagtgaccttcatgtacatggagtatttagatcaggggtctccaatcttttggcttccctgagccacactgggagaagaattgtcttgggccatgcataaaatatacgaacactaacgatggctgataagctaaaaaaaaaaaatgtgaaaaaatctcataatgttttaagaaagtttatgaatttgtgttgggctgtattccaagccgtccttggctgcatgtggtccctgggctggaggttggacaagcttgatagatgtttgggagaaaatgggaaagacaatgtaaactgaagggacctcatgaccaaagcaaagagatgaccaatgatgaccacttctactaggcacaagaaaggggttctatgtggctggtttgtagggtgcaggagaagcctggaagggtgggttaggggctgaatgttcaaataccttgaaagctgggctttgttctgtaggtgagagcgaaccatcagaagttcttttggagggcgtgttattctaaaaagcctgtttttattatgtacatatttattttttgagacggagtttcactcttgtcacccatgctggagtgcaatggggtgatcttggctcactgcaacctctgcctcctgggttcaagcaattctcctgcctcagcctcccaagttgatgggatcacaggcacccacaaccacgccccgctaatttttttttttttgtatttttagtagagatggggtttcaccatgttggccaggctgctctcgaactcctgacctcaggtaatccacccgcctcagcctcccaaagtgctgggattacatgtgttagccaccatgcccggaaaaagcctgttattttacttgattcttttaaaagataggcaaaggtcagatctttggactagtgaggaaaatacaggttaaatgatttttccaagttaaccagcaagtccatgatagtgatgaaggtaatgaaaatagtaacagctaacatttatcaagtattttctatatgccaggccctgttctaagcactttatatgcataatctcacttattcctctcaacaaccataggttgtaggttttaatattatccctgtattgcatatggataaatataggacacaaaccagttaaataatttgcccaaggacacacagtgtgtaagaagcagagctagaggccaggcgtggtggctcatgcctgtaatcccagcactttgggagaccaaagcaggcggatcacctgaggtcgggagttcaagaccagcctgggcaacatggtgaaaccccatctctaccaaaaatacaaaaattagctgggcacggttgtggacgcctgtaatcccagctactcaggaggctgaggcaggagactcacttgaacctgggaggcagaggttgcagtgagccaagatcacaccactatactctagcctaggtgacgagcaaaactctatctcaaaaaaaaaaaaaaaaaaaaaagaagcagggctagaaattgaacccaggccatatagcttcagcctatgcctttatcagctgacttcctaggtatttgggatttttattttatttatttatttagttttgagacggagtctcactctgttgcccaggctggagtgtagtggcatgatttcggcttacggcaacctctacctcccaggttcaagtgattcttctgcctcagcctcccaagtagctaggactacaggtgcctgcccccacacctggctaatttttgtatttttagtagagacagggttttgccatgttggccaggctggtcttgaactcctgacctcaggtaatccacccgcctcaggctaccaaagtgttgggattacaggtgtgagccaccacgcctggccgtatttgggatttttttttttttttttgaaacggggtttccctcttattgcccaggctggagtgcaatggcacaatctcggctcaccgcaacctctgcttcccgggttcaagcaattctactgcctcggtctcccgagtagctgggattacaggcatgtgccaccacaccaggctaattttgtatttttagtagagacggggtttcaccatgttggtcaggctggtttcaaactcccgaactcaggtgatccacccgcctcggcctcccaaagtgctgggattataggcatgaaccactgcgtctggcccatatttgggatttttaaacaggtaggtgatgggatcagacttgtagtcactttgtttggctacagtgtgaagaaggagttgaaggagagactgagaatagggagaccagacaggagggctgttgtaattgtctaaacgtacattgatgagaacctaaattggaaacagatgtgagatctgttaggtcctggtggggatagcacatagcacattatttttgacaatttgcttgtctgtcattggactataggcaatttgagagcagggactgcttgtcttgttcaccattctgtcttctaccaggataccttgaacatcttcagtgctcaatagttgctgaatgaataaatgagtctgagtaactccaagggtttgcttttagtgtctggcgggcttggtgatcattcatcaaagacagggaagatgggcattggagcagggtggggaatgttgcagagatgctgttgacttggggtatgctaagttaggtgtaactatagcaaacacgtgtagacttactgtgttccagacagtgttgtaagcacccttcatgggtaggtgtctctgttatctaaaattgggaactgaatagacttgagtagcaagaggtattaatgatttaaccatcacaacaacctcatgaagtaggtactattattatcatcaacttttaattttagagattaggaagctgagccatggaaaaaggaagtggcccaaggccatataaataagctgcagaggggatttgaacccggtcagccaggctccaggcacttagccactgcactgtactgcttcagtagagcatagaggtctgtgctcaggtctaggctagagctggaaccttctagagtcagtaaatattctgtacagcaccacaagactgacagtcatggctcaatcattgtcttcgcctgtaatcaagaaaggcctggttcctcaagggtggtgcttggagatagagtggttcaggttgtgtcagaagtggcctcggattctgcagtcccccgagctagagtgtgctatgtgttcagagtaggcttcaaaggccataccccctcattgcccctactcaccacccctagacctctctgctcaccctcagccacactaggtgccacccagtcgcagagcaaaaggagtttgcagggagggctaggaaatggtgagtatcagaaaaggtgtcctctgaggggtgggtaaactgcagtttagccctccccaataactgcatttctctatttttttctccttctttctctccctcatgcccctcccaacccctcatctccctgtcttcctcagtggtactgactgtcctcacccacacccctgcccctcgagtgagactgggacaagatgctctgctggacttgagctttgcctacatgccccccacctccgaggccgcctcatctctggctccgggtccccctccctttgggctagagtggcgacgccagcacctgggtaagggacatctgctcctggctgcaactcctgggctgaatggccagatgccagcagcccaagaaggggccgtggcatttgctgcttgggatgatgatgagccatggggcccatggaccggaaatgggaccttctggctgcctagagttcaaccctttcaggagggcacctatctggccaccatacacctgccatacctgcaaggacaggtcaccctggagcttgctgtgtacagtgagttgggggacagaggtctccaggggtagagggtgggcactggattgtggtgaccgtaatagggggagggatgatggataagagggtgcctgggcaagtaagtagagatagaaagaggttcctgggagttagaggggtaatgggaggctagaagtttcctggaaatttgaggggctttgacatgggtatttctgtgacgcaccaatggagagacagtgggtaccctatttcaggagaagaaacctaaccttctttagttctgaggaagccagcaggcaaactgagggtctcttagggaggacagtatggactgatttccctatgctcatttcgtcctctttccccagaaccccccaaagtgtccctgatgccagcaacccttgcacgggccgccccaggggaggcacccccggaattgctctgccttgtgtcccacttctacccttctgggggcctggaggtggagtgggaactccggggtggcccagggggccgctctcagaaggccgaggggcagaggtggctctcggccctgcgccaccattccgatggctctgtcagcctctctgggcacttgcagccgcccccagtcaccactgagcagcatggggcacgctatgcctgtcgaattcaccatcccagcctgcctgcctcggggcgcagcgctgaggtcaccctggaggtagcaggtaagagctgggagctctgcggaatctgagccagcacccaggaagacaggagctcactctcaccccttctgcctgccaggtctttcagggccctcccttgaggacagcgtaggccttttcctgtctgcctttcttctgcttgggctcttcaaggcactgggctgggctggtaagtgtcagccctaccctgaccatgacctgaggttggtggactttccccacctactcccaagagcctgacacccatccctctgccctccacctctaccactccagcatcccatcccttctcaatctttccccacagctgtctacctgtccacctgcaaggattcaaagaaggtacagtgctccacctctctgtatctttcccttgtcactttatctcctcatcctatctcaaaacccatggagggaggctgctggtgtggtaggcagaacctaggcttggaattcacactgatctgggttaaaacctggcactatatcctaactgtaggactctttgagcatgctacttaatctatatgtttccttgggtgtagggattttaaaaagttacttaggcagtgctgtccaatagaaagataatgcaagccacatatgtaaatttaaatactctagtactcacattaaaaaaataagcagaaacaggtaaaattaacttaataatataccttatttaatctaataattctggtcccttatctgaaatgcttgggtcagaagtgtttttggatgttggattttttcagactttggaatatttgcatatatttaatatctttgggatcagacccaaatctaaacacagaaatcatttatgtttcctatacaccttatacacatggcctgaagatttttttccttctctttttttttgagacagagtctctgtcgcccaggctggggtgcaatggtgcgatctcggctcactgcaacctccacctcccaggttcaagcgattctcctgccttagcctcccgagtagttgggattacaggcacccaccaccacgcctggctaatttttgtatttttagtagagacggggtttcaccatgttggtcaggctggtctcgaactcccgacctcaggtgatccgcccgctgccttggcctcccaaagcgttgggattacaggtgtgaaccgctgcacccgaccacaatatttttaataatatatgtgacccatcacatgagggcagctgtgggattttccacttgtggcatcatgttggcactaaaaaaatttcaggttttggaacatttcagattttagagttttggatcggcgatgctcaacctgtacatccaaaatattattgcaacatgtaaacaatataagaaattacaggccgggtgcgatggctcatgcctgtaatccctgcacttcgggaggccgaggcgggaggatcacctgaggtcaggagttcaagaccagcttagccaacatgatgaaaccccatctctactaaaaatacaaaaaattagccagatgtgacggcacctgtaatcccagctactcgggagactggggcaggagaatcgcttgaacctgggaggcagaggttgcagtgagctgagatcacaccattgcactccagcctgggtgacaaaaggaaaacttcgtctcaacaacaaaaaaaaaaagaaaaagaaattacagtcttggccaggtgcgttggttcacgcctgtaatcctagcactttgggaggctgaggagggcggatcacctgaggtcaggagttcaagaccagcctggccaacatggtgaaaccccgtctctactaaaaatacagaaaaattagccgggcatggtggtgcacacctgtaatctcagctactcaggaggctgaggcaggagaattgcttgaacctgggaggtggaggttgcagtgagccgagatcgcaccactgcactccagcctgggcaacagagtgaggctctgtctcaaaaaacaaaacaaaacaaaacaaaacaaattagctgggcatggtggcacacagctatagtcccagctacttggggagctgtggcagaaggatcgcttgaatctgggagggtgaggctgcaatgagctaaggttgtcccactgtactccagcctgggtgacaaagtgagaccctgtctcaaaaaaaaaaaaaaaaaagaaagaaaagaaaataaattgcagcccttttctcaccttaagtattcaaacacaggtgtttattttaaatagtcagcacatctcaattcggactagccacatatcaaatgctcaatagcctaatgtgggtggtggctgtcatattggacagcggagcctgagaggacttttaggaggattaaggaagacagtgtatctccttaagaagatgcaggagatacagcactcagcacagtgtctggagggcagaaaatattagcctcatccttctcccatcatctgtgcccatgatagtttatatgtctctaaactgaccatgtacacctcaactgccttttaatatcctgaattcctcaccaccttcctctcttccagaaagcagagtgagggcactcactgccatcctgtggaagccaccatcatctctggcccaagcttctgtagtagctccctaaaataataccctatcatctgctcctaatccctccaatctctctccactgagtggctggaatgcttttttttttttctttcacttatataagggataatttttcttttttttttttttttgagacggagtctcactcttccgcccaggctgcagtgcagtggcatgatcttggcttactgcaacctccgcctcctgggttcaagcaattctgtggcttcagcctccggagtagctgggattacaggcacatgccaccacacccagtgaatttttgtatttttagtagagacggggtttcaccatgttggccaggctggtcttgaattcctgacctcaggtgatctgcccacctcagcctcccaaagtgctgggattacaggcgtgagccaccacaccaggcccgagaaatgcttttttaaaaaacacacatcttatggcattcaccttcttggagctctaggacagtggttctcaaaatttttttctctcaggacctcttaaaaatcatcaaggaccccaaaaagcttttgggtatgtgggttatagctatcaatatttatggtactagaacttaaaagtgagaaaaatttaaaacacgagaatacataggcacacattctattcatcgtgggaaccatggtgtcaatacatatcatgtagcttctgaaaaactccactgtacacttatagaatgaagaaggcaaaaaactttttttttttttttttgagactgagtctcgctctgtcgcccaggctggagtgcagtggcgcgatctcggctcactgcaagctccgcctctcgggttcacgccattctcctgcctcagcctcccaagtagctcggactacaggcgtcctccaccatgcctggctaatattttgtattttttagtagagacggggtttcaccgtgttagccaggatggtctcgatctcctaacctggtgatccgcccgcctcggcctcccaaagtattgggattacccgcgtgagccaccgcgcccggctgcaaataatctttctttttttctttttttctgagacagagtctcgctctgttgcccaggctggagtgcagtggcacgatctcggctcacggcacgctccgcctcccgggttcacgccattctcctgcctcagcttcccgagtagctgggactacaggggcccgccaccacgcccggctaactttttgtgtttttagtagagacggggtttcaccgtgttagccaggatggtctcgatctcctgaccttgtgatctgcccgcctcggcctcccaaagtgctgggattacaggcgtgagccaccgcgcccggcggcgaaacacgatattgtactaacatcttaattttgttataaaatctcacaaaccccctgacatagtctcagagatctgtagggccgaggttacatttggagaacccgtactctagggccaaatccattcttcttgccctggctcacttgtcccccccaccgccccgcgctggagccactgcctagttcttcagccctagatggtgctcgccagacctcctctcaatgctcatcacacacagggctattcctttcctccaatgaaccaaacgcctcccgcccacctccaggtcccagtcctctgttccctttgcctggtccacccttgccctccctgggtcgcagacgaggtcggcctcgtcattccccgcagaccgccgcgcgtccctcttgtgcggttcaccacagttgtatttaagtgatcgtgtgagtcgtcgttaaatgcctgtctccccgcggatcatgggctcctcgaggacagggaccggcctgtctgtccactgctgtaaccccgcgccggcatagggacctaaggcccactggagggcgctcatcaagtagctgctggatgttgacgaaggaagcggcggcgcagctcagggatctccgagtcaggacggtcggccagacccacggggtaacgggtctaatcgtgtaggaataaagctgtattccagtgcttccaaa

SEQ ID NO: 85 - DNA, 14700 bp, Homo sapiens
ggggacgcggcacagatagggggaagccggagtaatggttttcgggcaagtggatgttggagagcacacacaggagttggggggcgggggagggcctggggttggggagggctcgaactcggggctgctgggtagtccaggagggcgcggtaaggctggggtatcctggtgagaactggagaggatctacccgggtccctgcctggccagtggggaaacaccggtcccccaggcaccttcacctaaccagagcggggatttccaccgcccctcatgccgccctttggaggaaagtgaaagtgaaaggaggaagaggaggcttcatggctgaggaggtcgcagcgccatgaagtccctgtctctgctcctcgctgtggctttgggtgagcgaaccccgcgactcatcgcccaagaactagagggaagcggagggaggtggccccactggagccgatgccagggtgggagtggggcaggtcaccagacatacaaaccgctcctcactcgcgtccctatacgccaggcctggcgaccgccgtctcagcaggacccgcggtgatcgagtgttggttcgtggaggatgcgagcggaaagggcctggccaagagacccggtgcactgctgttgcgccagggaccgggggaaccgccgccccggccggacctcgaccctgagctctatctcagtgtacacggtgagtctctagggactcgccgcccccctacctctgtcgcctccaccgaaaccccctcctctttagatccggcagtgacctcaggcctcagcttcccctttgtaaagtgagtctcactacggggtagtctgtgcatttgaagttccccgaacgctgcccttccagcccctttcccggcggtgactctacagctgcaacttccttctctacactcagaccccgcgggcgccctccaggctgccttcaggcggtatccccggggcgcccccgcaccacactgcgagatgagccgcttcgtgcctctccccgcctctgcgaaatgggccagcggcctgacccccgcgcagaactgcccgcgggccctggatggggcttggctgatggtcagcatatccagcccagtcctcagcctctccagcctcttgcgaccacagccagagcctcagcaggagcctgttctcatcaccatggcaacaggtagctggggaggggaggtggagaagggtgggtagattctaagggtccagatcagccggtggtctcgctttatggacttgagcaagacatttcgccaatcggggttcagtttcctttttttgttaagagaggtggtttggctagaatgaatcaatctctaccgctccttctagccctcacccagttaaaaaaaaaaacaaaaaaaaaactgcagcttggcagggggtagggggaaagcagggccgggcaggggggttactttctggtgtttcgaagggcggggctttgaagaggtggggtttcccgacaccagaccttgagagacttgtcaggtgatgcgaggtgggaggggttcagaagcagcagcgttttttctctgctcttcccagatctgtgtcttgctctgcaccctcagctttgcgggtcactctttcaaaacccagcactctatccccacctgcgcccacacccggcgctgcggcaatccgcaaagcaaaggctcttgcactctagcgcgttgaccttgcctgacagccccgtgtagggatgtgctgccgctctgtggtccgcaaacaggtgggctcgagtgggcggatggacgcggctggagattggatagctcctattgcactgaaaggtgcattgcagtttgaggcccaggagtcagaagcttttctaggctgggacgtgggagggactgtgcagataattcaagaatgaggagagtctgacctggatatctgggagctctccctcctggcagcggaggcggggtattccggggtagaataccggtagagttcttagcttttctatctggattttatgtcagcgacacagcccgatggacagggcaaccccaaccaatccctgcaccctcccttccctccaccctcctgagaattacccacagaaccagggagacagacttgaaacccacgctgaaaccctcacctctgcctatacctccattcttagtctcaagcccccaccctggcagaagctgaggaacactgctcttgtgtagacagtagctctctctggtggggtggaatatttcctagggctactggctccaccgaggtgatgatgagaatggtctttgctttctgagtttgtttttccaactgtaaaatgtggatactatttcccagctgcttttcttgttgtgactatcaagagatggcactgtgttaatttatccattgattcaataaatactttttagcaccaagaatgagttaggactcagcagttctcagtccacactgttggaggtttctaaaatatactgaaacctgattcaatcccatgcttagcttggccgattaaatcagaatctctggggtggccctgggtgcccttaagggtcacaaagatgatctgatgtagactctgctctccaggaggttctgggcgtatttgccacggataatcctaatgtaaagtagaaagtgaaggacatgcagacagggagccctggaagtgcccgggtggtaagattgtctgtatttcacaaacaactggggtcaaagcaaggtgctgtgctatttatttatttttattttatttatttatttatttttgagacagagttttgctcttgttgcccaggctggagtgcaatggcgtgatctcacgctcaccggaacctccgcctccctggttcaagcaattctcctgcctcagcctcccgagtagctgggattacaggtgcctgccaccacacccagctaattttgtatttttagtagagatgaggtttctccatgttggtaaggctggtctcgaactcccaacttcaggtgatcctcccacctcgcctcccgaagtgctgggattacaagcgtgagccactgcgcctgcctgctatttatttatttatttatttttgagacggagtctccctcttattgcccaggctagagtgcagttgcagtggcatgatcttggctcactgcaacctccgtctcccatgttcaagcaattcttgtgccttagcctccccagtagctgggattacaggcttgtgccaccacgcccacctaatttttgtatttttattggagacaggtttcaccatgttggccaggatggtcttgaactcctgacctaaggtgatccacccaccttggccttccaaagtgctgggattacaggcatgagccaccacgcccggcctgctgtgctctttcttttcaagcatttctgcttgatcagggatttaagaaaatgaaagctgttgtactgatgtaaaattagaaatgaaatctctccagggtccaagatcattcatgattttgctaatatacatttatacttgtcttatcaaatatttttaaatgtttattgacaaatatgcttatttatttatttatttgagacagggtctccctctgtcgcccaggctggagtgcagtgcaggctggagagcagtggcatgatctcagctcactgcaacctccacctccgtggctcaagtgatcctcgtgcctcagtctcctgagtagctgagaccacaggcatgtgccaccatgcccagctaatttttgtattttttttgtggagatgggtttttgtcaggttgcccaggctggtcttggactcctgggctcaattgatctgcccaccttggcctccgaaactgctgggattacacgtgtgagctgcctggccccaaatatactttttttttttttttttttttttgagacagagtctcaccctgttgcccaggctggagtgcaatggtgtgatctctgctcatttcaacttctgcctcctgagttcaagtaattctcctgtctcagcctcccaagtagctgagactacaggcgcccaccaccaggcccagctaatttttgtatttttagtggagacagggtttggtcatgttagccaggctggtcttgaactcctgacctcaggtgatccacccacctcagcctcccaaattgctgggattacaggcgtgagccaccacgccaggcctatactttcttaatatactttgtgtgtatagtgtttaattctcaccattcttttaaaatattatggagtcaggtgaggtgactcacgcctgtacttccagcactttgggaggtctaggtgggaggatcatttgcactcaggagttcaagaccagcctgggcaacataaccagaccttgtctctactaaaaattaaaaaaatgctgggcgcagtggctcatgcctgtaatcccagcactttgggaggccgaggtgggcagatcacctgaggtcgaaagttcaagaccagcctgaccaacatggagaaaccccgtctgtactaaaaatacaaaattagccaggcatggtggtgcatgcctgtaatcccagctactcggaaggctgaggcaagagaattgcttgaacctgggaggcggaggttgcagtgagccaagatcatgccactgcactccagcctgggcaacaagcgtgaaactgtctcaaaaaaaaaaaaaaaaaaaaaaggttgggtgtcgtggcatgtacctatggtcccagctactcgggaggctgtgttgggaggattgcacctttgatgggtgacagagtgagaccctgtctccaaaaaaaaaaaaaaaaaaaaaaaagagttaaactgtaaaacctttaggtcttgtttattatttttttaaattttttcttttaaatagagatggggtcttgctatgttgcccaggctggtctcaaactgctgggttcaagtgatcctcccacctcagcctcccaaggtactgggattacaagtctgagccaccctgcccagccaggttttgtttattaattctatggattttttttttttgagatcaagttttgctcttgttgcccagtctggagggcaatggcatgatctcggctcaccacaacctccgcctcccaggttcaagtgattctcctgcctcagcttcccaagcagctgtgattacaggcgtgtgccaccatgcccggataattctgtatttttagtagagacggggtttctccagtctggtctcaaactcccaacctcaggtgatccaccggcctcggcctcccaaagtgctgggattacaggcgtgagccactgtgcccagcctgtggatcttttttttttttttaacaattcaaaagtatgtttctggattttgacaaactaagtgaaattgcatactgtttttactctactgaacaattccatgaagatgagaacagttaaaccttataggcctcagaagctaggattaaaaagaacataaaaataattacaagaagaaaaagattacttctacctgaaggacctagacatttctgggaagaaacagcagtgaaagtgaccttcatgtacatggagtatttagatcaggggtctccaatcttttggcttccctgagccacactgggagaagaattgtcttgggccatgcataaaatatacgaacactaacgatggctgataagctaaaaaaaaaaaatgtgaaaaaatctcataatgttttaagaaagtttatgaatttgtgttgggctgtattccaagccgtccttggctgcatgtggtccctgggctggaggttggacaagcttgatagatgtttgggagaaaatgggaaagacaatgtaaactgaagggacctcatgaccaaagcaaagagatgaccaatgatgaccacttctactaggcacaagaaaggggttctatgtggctggtttgtagggtgcaggagaagcctggaagggtgggttaggggctgaatgttcaaataccttgaaagctgggctttgttctgtaggtgagagcgaaccatcagaagttcttttggagggcgtgttattctaaaaagcctgtttttattatgtacatatttattttttgagacggagtttcactcttgtcacccatgctggagtgcaatggggtgatcttggctcactgcaacctctgcctcctgggttcaagcaattctcctgcctcagcctcccaagttgatgggatcacaggcacccacaaccacgccccgctaattttttttttttttttttttgtatttttagtagagatggggtttcaccatgttggccaggctgctctcgaactcctgacctcaggtaatccacccgcctcagcctcccaaagtgctgggattacatgtgttagccaccatgcccggaaaaagcctgttattttacttgattcttttaaaagataggcaaaggtcagatctttggactagtgaggaaaatacaggttaaatgatttttccaagttaaccagcaagtccatgatagtgatgaaggtaatgaaaatagtaacagctaacatttatcaagtattttctatatgccaggccctgttctaagcactttatatgcataatctcacttattcctctcaacaaccataggttgtaggttttaatattatccctgtattgcatatggataaatataggacacaaaccagttaaataatttgcccaaggacacacagtgtgtaagaagcagagctagaggccaggcgtggtggctcatgcctgtaatcccagcactttgggagaccaaagcaggcggatcacctgaggtcgggagttcaagaccagcctgggcaacatggtgaaaccccatctctaccaaaaatacaaaaattagctgggcacggttgtggacgcctgtaatcccagctactcaggaggctgaggcaggagactcacttgaacctgggaggcagaggttgcagtgagccaagatcacaccactatactctagcctaggtgacgagcaaaactctatctcaaaaaaaaaaaaaaaaaaaaaagaagcagggctagaaattgaacccaggccatatagcttcagcctatgcctttatcagctgacttcctaggtatttgggatttttattttatttatttatttagttttgagacggagtctcactctgttgcccaggctggagtgtagtggcatgatttcggcttacggcaacctctacctcccaggttcaagtgattcttctgcctcagcctcccaagtagctaggactacaggtgcctgcccccacacctggctaatttttgtatttttagtagagacagggttttgccatgttggccaggctggtcttgaactcctgacctcaggtaatccacccgcctcaggctaccaaagtgttgggattacaggtgtgagccaccacgcctggccgtatttgggattttttttttttttttttgaaacggggtttccctcttattgcccaggctggagtgcaatggcacaatctcggctcaccgcaacctctgcttcccgggttcaagcaattctactgcctcggtctcccgagtagctgggattacaggcatgtgccaccacaccaggctaattttgtatttttagtagagacggggtttcaccatgttggtcaggctggtttcaaactcccgaactcaggtgatccacccgcctcggcctcccaaagtgctgggattataggcatgaaccactgcgtctggcccatatttgggatttttaaacaggtaggtgatgggatcagacttgtagtcactttgtttggctacagtgtgaagaaggagttgaaggagagactgagaatagggagaccagacaggagggctgttgtaattgtctaaacgtacattgatgagaacctaaattggaaacagatgtgagatctgttaggtcctggtggggatagcacatagcacattatttttgacaatttgcttgtctgtcattggactataggcaatttgagagcagggactgcttgtcttgttcaccattctgtcttctaccaggataccttgaacatcttcagtgctcaatagttgctgaatgaataaatgagtctgagtaactccaagggtttgcttttagtgtctggcgggcttggtgatcattcatcaaagacagggaagatgggcattggagcagggtggggaatgttgcagagatgctgttgacttggggtatgctaagttaggtgtaactatagcaaacacgtgtagacttactgtgttccagacagtgttgtaagcacccttcatgggtaggtgtctctgttatctaaaattgggaactgaatagacttgagtagcaagaggtattaatgatttaaccatcacaacaacctcatgaagtaggtactattattatcatcaacttttaattttagagattaggaagctgagccatggaaaaaggaagtggcccaaggccatataaataagctgcagaggggatttgaacccggtcagccaggctccaggcacttagccactgcactgtactgcttcagtagagcatagaggtctgtgctcaggtctaggctagagctggaaccttctagagtcagtaaatattctgtacagcaccacaagactgacagtcatggctcaatcattgtcttcgcctgtaatcaagaaaggcctggttcctcaagggtggtgcttggagatagagtggttcaggttgtgtcagaagtggcctcggattctgcagtcccccgagctagagtgtgctatgtgttcagagtaggcttcaaaggccataccccctcattgcccctactcaccacccctagacctctctgctcaccctcagccacactaggtgccacccagtcgcagagcaaaaggagtttgcagggagggctaggaaatggtgagtatcagaaaaggtgtcctctgaggggtgggtaaactgcagtttagccctccccaataactgcatttctctatttttttctccttctttctctccctcatgcccctcccaacccctcatctccctgtcttcctcagtggtactgactgtcctcacccacacccctgcccctcgagtgagactgggacaagatgctctgctggacttgagctttgcctacatgccccccacctccgaggccgcctcatctctggctccgggtccccctccctttgggctagagtggcgacgccagcacctgggtaagggacatctgctcctggctgcaactcctgggctgaatggccagatgccagcagcccaagaaggggccgtggcatttgctgcttgggatgatgatgagccatggggcccatggaccggaaatgggaccttctggctgcctagagttcaaccctttcaggagggcacctatctggccaccatacacctgccatacctgcaaggacaggtcaccctggagcttgctgtgtacagtgagttgggggacagaggtctccaggggtagagggtgggcactggattgtggtgaccgtaatagggggagggatgatggataagagggtgcctgggcaagtaagtagagatagaaagaggttcctgggagttagagggataatgggaggctagaagtttcctggaaatttgaggggctttgacatgggtatttctgtgacgcaccaatggagagacagtgggtaccctatttcaggagaagaaacctaaccttctttagttctgaggaagccagcaggcaaactgagggtctcttagggaggacagtatggactgatttccctatgctcatttcgtcctctttccccagaaccccccaaagtgtccctgatgccagcaacccttgcacgggccgccccaggggaggcacccccggaattgctctgccttgtgtcccacttctacccttctgggggcctggaggtggagtgggaactccggggtggcccagggggccgctctcagaaggccgaggggcagaggtggctctcggccctgcgccaccattccgatggctctgtcagcctctctgggcacttgcagccgcccccagtcaccactgagcagcatggggcacgctatgcctgtcgaattcaccatcccagcctgcctgcctcggggcgcagcgctgaggtcaccctggaggtagcaggtaagagctgggagctctgcggaatctgagccagcacccaggaagacaggagctcactctcaccccttctgcctgccaggtctttcagggccctcccttgaggacagcgtaggccttttcctgtctgcctttcttctgcttgggctcttcaaggcactgggctgggctggtaagtgtcagccctaccctgaccatgacctgaggttggtggactttccccacctactcccaagagcctgacacccatccctctgccctccacctctaccactccagcatcccatcccttctcaatctttccccacagctgtctacctgtccacctgcaaggattcaaagaaggtacagtgctccacctctctgtatctttcccttgtcactttatctcctcatcctatctcaaaacccatggagggaggctgctggtgtggtaggcagaacctaggcttggaattcacactgatctgggttaaaacctggcactatatcctaactgtaggactctttgagcatgctacttaatctatatgtttccttgggtgtagggattttaaaaagttacttaggcagtgctgtccaatagaaagataatgcaagccacatatgtaaatttaaatactctagtactcacattaaaaaaataagcagaaacaggtaaaattaacttaataatataccttatttaatctaataattctggtcccttatctgaaatgcttgggtcagaagtgtttttggatgttggattttttcagactttggaatatttgcatatatttaatatctttgggatcagacccaaatctaaacacagaaatcatttatgtttcctatacaccttatacacatggcctgaagatttttttccttctctttttttttgagacagagtctctgtcgcccaggctggggtgcaatggtgcgatctcggctcactgcaacctccacctcccaggttcaagcgattctcctgccttagcctcccgagtagttgggattacaggcacccaccaccacgcctggctaatttttgtatttttagtagagacggggtttcaccatgttggtcaggctggtctcgaactcccgacctcaggtgatccgcccgctgccttggcctcccaaagcgttgggattacaggtgtgaaccgctgcacccgaccacaatatttttaataatatatgtgacccatcacatgagggcagctgtgggattttccacttgtggcatcatgttggcactaaaaaaatttcaggttttggaacatttcagattttagagttttggatcggcgatgctcaacctgtacatccaaaatattattgcaacatgtaaacaatataagaaattacaggccgggtgcgatggctcatgcctgtaatccctgcacttcgggaggccgaggcgggaggatcacctgaggtcaggagttcaagaccagcttagccaacatgatgaaaccccatctctactaaaaatacaaaaaattagccagatgtgacggcacctgtaatcccagctactcgggagactggggcaggagaatcgcttgaacctgggaggcagaggttgcagtgagctgagatcacaccattgcactccagcctgggtgacaaaaggaaaacttcgtctcaacaacaaaaaaaaaaagaaaaagaaattacagtcttggccaggtgcgttggttcacgcctgtaatcctagcactttgggaggctgaggagggcggatcacctgaggtcaggagttcaagaccagcctggccaacatggtgaaaccccgtctctactaaaaatacagaaaaattagccgggcatggtggtgcacacctgtaatctcagctactcaggaggctgaggcaggagaattgcttgaacctgggaggtggaggttgcagtgagccgagatcgcaccactgcactccagcctgggcaacagagtgaggctctgtctcaaaaaacaaaacaaaacaaaacaaaacaaattagctgggcatggtggcacacagctatagtcccagctacttggggagctgtggcagaaggatcgcttgaatctgggagggtgaggctgcaatgagctaaggttgtcccactgtactccagcctgggtgacaaagtgagaccctgtctcaaaaaaaaaaaaaaaaaaagaaagaaaagaaaataaattgcagcccttttctcaccttaagtattcaaacacaggtgtttattttaaatagtcagcacatctcaattcggactagccacatatcaaatgctcaatagcctaatgtgggtggtggctgtcatattggacagcggagcctgagaggacttttaggaggattaaggaagacagtgtatctccttaagaagatgcaggagatacagcactcagcacagtgtctggagggcagaaaatattagcctcatccttctcccatcatctgtgcccatgatagtttatatgtctctaaactgaccatgtacacctcaactgccttttaatatcctgaattcctcaccaccttcctctcttccagaaagcagagtgagggcactcactgccatcctgtggaagccaccatcatctctggcccaagcttctgtagtagctccctaaaataataccctatcatctgctcctaatccctccaatctctctccactgagtggctggaatgcttttttttttttctttcacttatataagggataatttttctttttttttttttttgagacggagtctcactcttccgcccaggctgcagtgcagtggcatgatcttggcttactgcaacctccgcctcctgggttcaagcaattctgtggcttcagcctccggagtagctgggattacaggcacatgccaccacacccagtgaatttttgtatttttagtagagacggggtttcaccatgttggccaggctggtcttgaattcctgacctcaggtgatctgcccacctcagcctcccaaagtgctgggattacaggcgtgagccaccacaccaggcccgagaaatgcttttttaaaaaacacacatcttatggcattcaccttcttggagctctaggacagtggttctcaaaatttttttctctcaggacctcttaaaaatcatcaaggaccccaaaaagcttttgggtatgtgggttatagctatcaatatttatggtactagaacttaaaagtgagaaaaatttaaaacacgagaatacataggcacacattctattcatcgtgggaaccatggtgtcaatacatatcatgtagcttctgaaaaactccactgtacacttatagaatgaagaaggcaaaaaacttttttttttttttttttgagacggagtctcgctctgtcgcccaggctggagtgcagtggcgcgatctcggctcactgcaagctccgcctctcgggttcacgccattctcctgcctcagcctcccaagtagctcggactacaggcgtcctccaccatgcctggctaatattttgtattttttagtagagacggggtttcaccgtgttagccaggatggtctcgatctcctaacctggtgatccgcccgcctcggcctcccaaagtattgggattacccgcgtgagccaccgcgcccggctgcaaataatctttctttttttctttttttctgagacagagtctcgctctgttgcccaggctggagtgcagtggcacgatctcggctcacggcacgctccgcctcccgggttcacgccattctcctgcctcagcttcccgagtagctgggactacaggggcccgccaccacgcccggctaactttttgtgtttttagtagagacggggtttcaccgtgttagccaggatggtctcgatctcctgaccttgtgatctgcccgcctcggcctcccaaagtgctgggattacaggcgtgagccaccgcgcccggcggcgaaacacgatattgtactaacatcttaattttgttataaaatctcacaaaccccctgacatagtctcagagatctgtagggccgaggttacatttggagaacccgtactctagggccaaatccattcttcttgccctggctcacttgtcccccccaccgccccgcgctggagccactgcctagttcttcagccctagatggtgctcgccagacctcctctcaatgctcatcacacacagggctattcctttcctccaatgaaccaaacgcctcccgcccacctccaggtcccagtcctctgttccctttgcctggtccacccttgccctccctgggtcgcagacgaggtcggcctcgtcattccccgcagaccgccgcgcgtccctcttgtgcggttcaccacagttgtatttaagtgatcgtgtgagtcgtcgttaaatgcctgtctccccgcggatcatgggctcctcgaggacagggaccggcctgtctgtccactgctgtaaccccgcgccggcatagggacctaaggcccactggagggcgctcatcaagtagctgctggatgttgacgaaggaagcggcggcgcagctcagggatctccgagtcaggacggtcggccagacccacggggtaacgggtctaatcgtgtaggaataaagctgtattccagtgcttccaaa

SEQ ID NO: 86 - DNA, 14692 bp, Homo sapiens; identical to SEQ ID NO: 84

SEQ ID NO: 87 - DNA, 14691 bp, Homo sapiens
ggggacgcggcacagatagggggaagccggagtaatggttttcgggcaagtggatgttggagagcacacacaggagttggggggcgggggagggcctggggttggggagggctcgaactcggggctgctgggtagtccaggagggcgcggtaaggctggggtatcctggtgagaactggagaggatctacccgggtccctgcctggccagtggggaaacaccggtcccccaggcaccttcacctaaccagagcggggatttccaccgcccctcatgccgccctttggaggaaagtgaaagtgaaaggaggaagaggaggctaaatggctgaggaggtcgcagcgccatgaagtccctgtctctgctcctcgctgtggctttgggtgagcgaaccccgcgactcatcgcccaagaactagagggaagcggagggaggtggccccactggagccgatgccagggtgggagtggggcaggtcaccagacatacaaaccgctcctcactcgcgtccctatacgccaggcctggcgaccgccgtctcagcaggacccgcggtgatcgagtgttggttcgtggaggatgcgagcggaaagggcctggccaagagacccggtgcactgctgttgcgccagggaccgggggaaccgccgccccggccggacctcgaccctgagctctatctcagtgtacacggtgagtctctagggactcgccgcccccctacctctgtcgcctccaccgaaaccccctcctctttagatccggcagtgacctcaggcctcagcttcccctttgtaaagtgagtctcactacggggtagtctgtgcatttgaagttccccgaacgctgcccttccagcccctttcccggcggtgactctacagctgcaacttccttctctacactcagaccccgcgggcgccctccaggctgccttcaggcggtatccccggggcgcccccgcaccacactgcgagatgagccgcttcgtgcctctccccgcctctgcgaaatgggccagcggcctgacccccgcgcagaactgcccgcgggccctggatggggcttggctgatggtcagcatatccagcccagtcctcagcctctccagcctcttgcgaccacagccagagcctcagcaggagcctgttctcatcaccatggcaacaggtagctggggaggggaggtggagaagggtgggtagattctaagggtccagatcagccggtggtctcgctttatggacttgagcaagacatttcgccaatcggggttcagtttcctttttttgttaagagaggtggtttggctagaatgaatcaatctctaccgctccttctagccctcacccagttaaaaaaaaaaacaaaaaaaaaactgcagcttggcagggggtagggggaaagcagggccgggcaggggggttactttctggtgtttcgaagggcggggctttgaagaggtggggtttcccgacaccagaccttgagagacttgtcaggtgatgcgaggtgggaggggttcagaagcagcagcgttttttctctgctcttcccagatctgtgtcttgctctgcaccctcagctttgcgggtcactctttcaaaacccagcactctatccccacctgcgcccacacccggcgctgcggcaatcctcaaagcaaaggctcttgcactctagcgcgttgaccttgcctgacagccccgtgtagggatgtgctgccgctctgtggtccgcaaacaggtgggctcgagtgggcggatggacgcggctggagattggatagctcctattgcactgaaaggtgcattgcagtttgaggcccaggagtcagaagcttttctaggctgagacgtgggagggactgtgcagataattcaagaatgaggagagtctgacctggatatctgggagctctccctcctggcagcggaggcggggtattccggggtagaataccggtagagttcttagcttttctatctggattttatgtcagcgacacagcccgatggacagggcaaccccaaccaatccctgcaccctcccttccctccaccctcctgagaattacccacagaaccagggagacagacttgaaacccacgctgaaaccctcacctctgcctatacctccattcttagtctcaagcccccaccctggcagaagctgaggaacactgctcttgtgtagacagtagctctctctggtggggtggaatatttcctagggctactggctccaccgaggtgatgatgagaatggtctttgctttctgagtttgtttttccaactgtaaaatgtggatactatttcccagctgcttttcttgttgtgactatcaagagatggcactgtgttaatttatccattgattcaataaatactttttagcaccaagaatgagttaggactcagcagttctcagtccacactgttggaggtttctaaaatatactgaaacctgattcaatcccatgcttagcttggccgattaaatcagaatctctggggtggccctgggtgcccttaagggtcacaaagatgatctgatgtagactctgctctccaggaggttctgggcgtatttgccacggataatcctaatgtaaagtagaaagtgaaggacatgcagacagggagccctggaagtgcccgggtggtaagattgtctgtatttcacaaacaactggggtcaaagcaaggtgctgtgctatttatttatttttattttatttatttatttatttttgagacagagttttgctcttgttgcccaggctggagtgcaatggcgtgatctcacgctcaccggaacctccgcctccctggttcaagcaattctcctgcctcagcctcccgagtagctgggattacaggtgcctgccaccacacccagctaattttgtatttttagtagagatgaggtttctccatgttggtaaggctggtctcgaactcccaacttcaggtgatcctcccacctcgcctcccgaagtgctgggattacaagcgtgagccactgcgcctgcctgctatttatttatttatttatttttgagacggagtctccctcttattgcccaggctagagtgcagttgcagtggcatgatcttggctcactgcaacctccgtctcccatgttcaagcaattcttgtgccttagcctccccagtagctgggattacaggcttgtgccaccacgcccacctaatttttgtatttttattggagacaggtttcaccatgttggccaggatggtcttgaactcctgacctaaggtgatccacccaccttggccttccaaagtgctgggattacaggcatgagccaccacgcctggcctgctgtgctctttcttttcaagcatttctgcttgatcagggatttaagaaaatgaaagctgttgtactgatgtaaaattagaaatgaaatctctccagggtccaagatcattcatgattttgctaatatacatttatacttgtcttatcaaatatttttaaatgtttattgacaaatatgcttatttatttatttatttgagacagggtctccctctgtcgcccaggctggagtgcagtgcaggctggagagcagtggcatgatctcagctcactgcaacctccacctccgtggctcaagtgatcctcgtgcctcagtctcctgagtagctgagaccacaggcatgtgccaccatgcccagctaatttttgtattttttttgtggagatgggtttttgtcaggttgcccaggctggtcttggactcctgggctcaattgatctgcccaccttggcctccgaaactgctgggattacacgtgtgagctgcctggccccaaatatactttttttttttttttttttttttgagacagagtctcaccctgttgcccaggctggagtgcaatggtgtgatctctgctcatttcaacttctgcctcctgagttcaagtaattctcctgtctcagcctcccaagtagctgagactacaggcgcccaccaccaggcccagctaatttttgtatttttagtggagacagggtttggtcatgttagccaggctggtcttgaactcctgacctcaggtgatccacccacctcagcctcccaaattgctgggattacaggcgtgagccaccacgccaggcctatactttcttaatatactttgtgtgtatagtgtttaattctcaccattcttttaaaatattatggagtcaggtgaggtgactcacgcctgtacttccagcactttgggaggtctaggtgggaggatcatttgcactcaggagttcaagaccagcctgggcaacataaccagaccttgtctctactaaaaattaaaaaaatgctgggcgcagtggctcatgcctgtaatcccagcactttgggaggccgaggtgggcagatcacctgaggtcgaaagttcaagaccagcctgaccaacatggagaaaccccgtctgtactaaaaatacaaaattagccaggcatggtggtgcatgcctgtaatcccagctactcggaaggctgaggcaagagaattgcttgaacctgggaggcggaggttgcagtgagccaagatcatgccactgcactccagcctgggcaacaagcgtgaaactgtctcaaaaaaaaaaaaaaaaaaaaaaggttgggtgtcgtggcatgtacctatggtcccagctactcgggaggctgtgttgggaggattgcacctttgatgggtgacagagtgagaccctgtctccaaaaaaaaaaaaaaaaaaaaaaaagagttaaactgtaaaacctttaggtcttgtttattatttttttaaattttttcttttaaatagagatggggtcttgctatgttgcccaggctggtctcaaactgctgggttcaagtgatcctcccacctcagcctcccaaggtactgggattacaagtctgagccaccctgcccagccaggttttgtttattaattctatggattttttttttttgagatcaagttttgctcttgttgcccagtctggagggcaatggcatgatctcggctcaccacaacctccgcctcccaggttcaagtgattctcctgcctcagcttcccaagcagctgtgattacaggcgtgtgccaccatgcccggataattctgtatttttagtagagacggggtttctccagtctggtctcaaactcccaacctcaggtgatccaccggcctcggcctcccaaagtgctgggattacaggcgtgagccactgtgcccagcctgtggatcttttttttttttttaacaattcaaaagtatgtttctggattttgacaaactaagtgaaattgcatactgtttttactctactgaacaattccatgaagatgagaacagtttaaccttataggcctcagaagctaggattaaaaagaacataaaaataattacaagaagaaaaagattacttctacctgaaggacctagacatttctgggaagaaacagcagtgaaagtgaccttcatgtacatggagtatttagatcaggggtctccaatcttttggcttccctgagccacactgggagaagaattgtcttgggccatgcataaaatatacgaacactaacgatggctgataagctaaaaaaaaaaaatgtgaaaaaatctcataatgttttaagaaagtttatgaatttgtgttgggctgtattccaagccgtccttggctgcatgtggtccctgggctggaggttggacaagcttgatagatgtttgggagaaaatgggaaagacaatgtaaactgaagggacctcatgaccaaagcaaagagatgaccaatgatgaccacttctactaggcacaagaaaggggttctatgtggctggtttgtagggtgcaggagaagcctggaagggtgggttaggggctgaatgttcaaataccttgaaagctgggctttgttctgtaggtgagagcgaaccatcagaagttcttttggagggcgtgttattctaaaaagcctgtttttattatgtacatatttattttttgagacggagtttcactcttgtcacccatgctggagtgcaatggggtgatcttggctcactgcaacctctgcctcctgggttcaagcaattctcctgcctcagcctcccaagttgatgggatcacaggcacccacaaccacgccccgctaatttttttttttttgtatttttagtagagatggggtttcaccatgttggccaggctgctctcgaactcctgacctcaggtaatccacccgcctcagcctcccaaagtgctgggattacatgtgttagccaccatgcccggaaaaagcctgttattttacttgattcttttaaaagataggcaaaggtcagatctttggactagtgaggaaaatacaggttaaatgatttttccaagttaaccagcaagtccatgatagtgatgaaggtaatgaaaatagtaacagctaacatttatcaagtattttctatatgccaggccctgttctaagcactttatatgcataatctcacttattcctctcaacaaccataggttgtaggttttaatattatccctgtattgcatatggataaatataggacacaaaccagttaaataatttgcccaaggacacacagtgtgtaagaagcagagctagaggccaggcgtggtggctcatgcctgtaatcccagcactttgggagaccaaagcaggcggatcacctgaggtcgggagttcaagaccagcctgggcaacatggtgaaaccccatctctaccaaaaatacaaaaattagctgggcacggttgtggacgcctgtaatcccagctactcaggaggctgaggcaggagactcacttgaacctgggaggcagaggttgcagtgagccaagatcacaccactatactctagcctaggtgacgagcaaaactctatctcaaaaaaaaaaaaaaaaaaaaaagaagcagggctagaaattgaacccaggccatatagcttcagcctatgcctttatcagctgacttcctaggtatttgggatttttattttatttatttatttagttttgagacggagtctcactctgttgcccaggctggagtgtagtggcatgatttcggcttacggcaacctctacctcccaggttcaagtgattcttctgcctcagcctcccaagtagctaggactacaggtgcctgcccccacacctggctaatttttgtatttttagtagagacagggttttgccatgttggccaggctggtcttgaactcctgacctcaggtaatccacccgcctcaggctaccaaagtgttgggattacaggtgtgagccaccacgcctggccgtatttgggatttttttttttttttttgaaacggggtttccctcttattgcccaggctggagtgcaatggcacaatctcggctcaccgcaacctctgcttcccgggttcaagcaattctactgcctcggtctcccgagtagctgggattacaggcatgtgccaccacaccaggctaattttgtatttttagtagagacggggtttcaccatgttggtcaggctggtttcaaactcccgaactcaggtgatccacccgcctcggcctcccaaagtgctgggattataggcatgaaccactgcgtctggcccatatttgggatttttaaacaggtaggtgatgggatcagacttgtagtcactttgtttggctacagtgtgaagaaggagttgaaggagagactgagaatagggagaccagacaggagggctgttgtaattgtctaaacgtacattgatgagaacctaaattggaaacagatgtgagatctgttaggtcctggtggggatagcacatagcacattatttttgacaatttgcttgtctgtcattggactataggcaatttgagagcagggactgcttgtcttgttcaccattctgtcttctaccaggataccttgaacatcttcagtgctcaatagttgctgaatgaataaatgagtctgagtaactccaagggtttgcttttagtgtctggcgggcttggtgatcattcatcaaagacagggaagatgggcattggagcagggtggggaatgttgcagagatgctgttgacttggggtatgctaagttaggtgtaactatagcaaacacgtgtagacttactgtgttccagacagtgttgtaagcacccttcatgggtaggtgtctctgttatctaaaattgggaactgaatagacttgagtagcaagaggtattaatgatttaaccatcacaacaacctcatgaagtaggtactattattatcatcaacttttaattttagagattaggaagctgagccatggaaaaaggaagtggcccaaggccatataaataagctgcagaggggatttgaacccggtcagccaggctccaggcacttagccactgcactgtactgcttcagtagagcatagaggtctgtgctcaggtctaggctagagctggaaccttctagagtcagtaaatattctgtacagcaccacaagactgacagtcatggctcaatcattgtcttcgcctgtaatcaagaaaggcctggttcctcaagggtggtgcttggagatagagtggttcaggttgtgtcagaagtggcctcggattctgcagtcccccgagctagagtgtgctatgtgttcagagtaggcttcaaaggccataccccctcattgcccctactcaccacccctagacctctctgctcaccctcagccacactaggtgccacccagtcgcagagcaaaaggagtttgcagggagggctaggaaatggtgagtatcagaaaaggtgtcctctgaggggtgggtaaactgcagtttagccctccccaataactgcatttctctatttttttctccttctttctctccctcatgcccctcccaacccctcatctccctgtcttcctcagtggtactgactgtcctcacccacacccctgcccctcgagtgagactgggacaagatgctctgctggacttgagctttgcctacatgccccccacctccgaggccgcctcatctctggctccgggtccccctccctttgggctagagtggcgacgccagcacctgggtaagggacatctgctcctggctgcaactcctgggctgaatggccagatgccagcagcccaagaaggggccgtggcatttgctgcttgggatgatgatgagccatggggcccatggaccggaaatgggaccttctggctgcctagagttcaaccctttcaggagggcacctatctggccaccatacacctgccatacctgcaaggacaggtcaccctggagcttgctgtgtacagtgagttgggggacagaggtctccaggggtagagggtgggcactggattgtggtgaccgtaatagggggagggatgatggataagagggtgcctgggcaagtaagtagagatagaaagaggttcctgggagttagaggggtaatgggaggctagaagtttcctggaaatttgaggggctttgacatgggtatttctgtgacgcaccaatggagagacagtgggtaccctatttcaggagaagaaacctaaccttctttagttctgaggaagccagcaggcaaactgagggtctcttagggaggacagtatggactgatttccctatgctcatttcgtcctctttccccagaaccccccaaagtgtccctgatgccagcaacccttgcacgggccgccccaggggaggcacccccggaattgctctgccttgtgtcccacttctacccttctgggggcctggaggtggagtgggaactccggggtggcccagggggccgctctcagaaggccgaggggcagaggtggctctcggccctgcgccaccattccgatggctctgtcagcctctctgggcacttgcagccgcccccagtcaccactgagcagcatggggcacgctatgcctgtcgaattcaccatcccagcctgcctgcctcggggcgcagcgctgaggtcaccctggaggtagcaggtaagagctgggagctctgcggaatctgagccagcacccaggaagacaggagctcactctcaccccttctgcctgccaggtctttcagggccctcccttgaggacagcgtaggccttttcctgtctgcctttcttctgcttgggctcttcaaggcactgggctgggctggtaagtgtcagccctaccctgaccatgacctgaggttggtggactttccccacctactcccaagagcctgacacccatccctctgccctccacctctaccactccagcatcccatcccttctcaatctttccccacagctgtctacctgtccacctgcaaggattcaaagaaggtacagtgctccacctctctgtatctttcccttgtcactttatctcctcatcctatctcaaaacccatggagggaggctgctggtgtggtaggcagaacctaggcttggaattcacactgatctgggttaaaacctggcactatatcctaactgtaggactctttgagcatgctacttaatctatatgtttccttgggtgtagggattttaaaaagttacttaggcagtgctgtccaatagaaagataatgcaagccacatatgtaaatttaaatactctagtactcacattaaaaaaataagcagaaacaggtaaaattaacttaataatataccttatttaatctaataattctggtcccttatctgaaatgcttgggtcagaagtgtttttggatgttggattttttcagactttggaatatttgcatatatttaatatctttgggatcagacccaaatctaaacacagaaatcatttatgtttcctatacaccttatacacatggcctgaagatttttttccttctctttttttttgagacagagtctctgtcgcccaggctggggtgcaatggtgcgatctcggctcactgcaacctccacctcccaggttcaagcgattctcctgccttagcctcccgagtagttgggattacaggcacccaccaccacgcctggctaatttttgtatttttagtagagacggggtttcaccatgttggtcaggctggtctcgaactcccgacctcaggtgatccgcccgctgccttggcctcccaaagcgttgggattacaggtgtgaaccgctgcacccgaccacaatatttttaataatatatgtgacccatcacatgagggcagctgtgggattttccacttgtggcatcatgttggcactaaaaaaatttcaggttttggaacatttcagattttagagttttggatcggcgatgctcaacctgtacatccaaaatattattgcaacatgtaaacaatataagaaattacaggccgggtgcgatggctcatgcctgtaatccctgcacttcgggaggccgaggcgggaggatcacctgaggtcaggagttcaagaccagcttagccaacatgatgaaaccccatctctactaaaaatacaaaaaattagccagatgtgacggcacctgtaatcccagctactcgggagactggggcaggagaatcgcttgaacctgggaggcagaggttgcagtgagctgagatcacaccattgcactccagcctgggtgacaaaaggaaaacttcgtctcaacaacaaaaaaaaaaagaaaaagaaattacagtcttggccaggtgcgttggttcacgcctgtaatcctagcactttgggaggctgaggagggcggatcacctgaggtcaggagttcaagaccagcctggccaacatggtgaaaccccgtctctactaaaaatacagaaaaattagccgggcatggtggtgcacacctgtaatctcagctactcaggaggctgaggcaggagaattgcttgaacctgggaggtggaggttgcagtgagccgagatcgcaccactgcactccagcctgggcaacagagtgaggctctgtctcaaaaaacaaaacaaaacaaaacaaaacaaattagctgggcatggtggcacacagctatagtcccagctacttggggagctgtggcagaaggatcgcttgaatctgggagggtgaggctgcaatgagctaaggttgtcccactgtactccagcctgggtgacaaagtgagaccctgtctcaaaaaaaaaaaaaaaaaagaaagaaaagaaaataaattgcagcccttttctcaccttaagtattcaaacacaggtgtttattttaaatagtcagcacatctcaattcggactagccacatatcaaatgctcaatagcctaatgtgggtggtggctgtcatattggacagcggagcctgagaggacttttaggaggattaaggaagacagtgtatctccttaagaagatgcaggagatacagcactcagcacagtgtctggagggcagaaaatattagcctcatccttctcccatcatctgtgcccatgatagtttatatgtctctaaactgaccatgtacacctcaactgccttttaatatcctgaattcctcaccaccttcctctcttccagaaagcagagtgagggcactcactgccatcctgtggaagccaccatcatctctggcccaagcttctgtagtagctccctaaaataataccctatcatctgctcctaatccctccaatctctctccactgagtggctggaatgcttttttttttttctttcacttatataagggataatttttcttttttttttttttttgagacggagtctcactcttccgcccaggctgcagtgcagtggcatgatcttggcttactgcaacctccgcctcctgggttcaagcaattctgtggcttcagcctccggagtagctgggattacaggcacatgccaccacacccagtgaatttttgtatttttagtagagacggggtttcaccatgttggccaggctggtcttgaattcctgacctcaggtgatctgcccacctcagcctcccaaagtgctgggattacaggcgtgagccaccacaccaggcccgagaaatgcttttttaaaaaacacacatcttatggcattcaccttcttggagctctaggacagtggttctcaaaatttttttctctcaggacctcttaaaaatcatcaaggaccccaaaaagcttttgggtatgtgggttatagctatcaatatttatggtactagaacttaaaagtgagaaaaatttaaaacacgagaatacataggcacacattctattcatcgtgggaaccatggtgtcaatacatatcatgtagcttctgaaaaactccactgtacacttatagaatgaagaaggcaaaaaactttttttttttttttttgagactgagtctcgctctgtcgcccaggctggagtgcagtggcgcgatctcggctcactgcaagctccgcctctcgggttcacgccattctcctgcctcagcctcccaagtagctcggactacaggcgtcctccaccatgcctggctaatattttgtattttttagtagagacggggtttcaccgtgttagccaggatggtctcgatctcctaacctggtgatccgcccgcctcggcctcccaaagtattgggattacccgcgtgagccaccgcgcccggctgcaaataatctttctttttttctttttttctgagacagagtctcgctctgttgcccaggctggagtgcagtggcacgatctcggctcacggcacgctccgcctcccgggttcacgccattctcctgcctcagcttcccgagtagctgggactacaggggcccgccaccacgcccggctaactttttgtgtttttagtagagacggggtttcaccgtgttagccaggatggtctcgatctcctgaccttgtgatctgcccgcctcggcctcccaaagtgctgggattacaggcgtgagccaccgcgcccggcggcgaaacacgatattgtactaacatcttaattttgttataaaatctcacaaaccccctgacatagtctcagagatctgtagggccgaggttacatttggagaacccgtactctagggccaaatccattcttcttgccctggctcacttgtcccccccaccgccccgcgctggagccactgcctagttcttcagccctagatggtgctcgccagacctcctctcaatgctcatcacacacagggctattcctttcctccaatgaaccaaacgcctcccgcccacctccaggtcccagtcctctgttccctttgcctggtccacccttgccctccctgggtcgcagacgaggtcggcctcgtcattccccgcagaccgccgcgcgtccctcttgtgcggttcaccacagttgtatttaagtgatcgtgtgagtcgtcgttaaatgcctgtctccccgcggatcatgggctcctcgaggacagggaccggcctgtctgtccactgctgtaaccccgcgccggcatagggacctaaggcccactggagggcgctcatcaagtagctgctggatgttgacgaaggaagcggcggcgcagctcagggatctccgagtcaggacggtcggccagacccacggggtaacgggtctaatcgtgtaggaataaagctgtattccagtgcttccaaa
